United States Patent Application Publication US 2026/0152733 A1 - sequence listing, part 2

SEQ ID NO: 19755 - RNA, 3231 nt, synthetic construct
  source 1..3231: mol_type = other RNA
  modified_base 1..3231: mod_base = OTHER; note = Each t is m1f
aaataagagagaaaagaagagtaagaagaaatataagagccaccatggcccctgctgccaagagagtgaagctggatagcagacaggagatcaagcggattaataaaattcggagaagactggtgaaggattctaacacaaagaaggctggcaagacaggccctatgaagacactgctggtgagagtgatgacacccgacctgagagaaagactggaaaacctgagaaagaagcctgagaatatcccccagcccatcagcaacacaagccgggccaacctgaataagctgctgaccgactacaccgaaatgaagaaggccatcctgcacgtgtattgggaagagttccagaaagacccagtcggcctgatgagcagagtggctcagcctgccagcaagaagatcgatcagaacaagctgaagcccgaaatggacgagaaggggaacctgacaaccgccggctttgcctgtagccagtgcggccagcccctgtttgtgtacaaactggaacaggtgagcgaaaagggcaaggcttacacgaattacttcggcagatgcaacgtggccgagcacgagaagctgatcctgctggcccagctgaagcctgagaaggatagcgatgaggcagtgacatattccctgggcaagttcggacagcgggccctggatttttattccattcatgtgaccaaggaatccacccaccccgtcaagcctcttgcccaaattgccggcaacagatacgccagcggccccgtgggcaaggccctgagcgacgcctgtatgggcaccatcgccagcttcctgtctaagtaccaggacattatcatcgagcaccagaaggtggtgaagggcaaccagaagagactggagagcctgcgcgagctggccggcaaggaaaacctggagtatcctagcgtgaccctgcctcctcagcctcatacaaaggagggcgtggatgcctacaacgaagtgatcgcccgggtgcggatgtgggtgaacctgaatctgtggcagaagctgaagctgtctagagacgacgccaagcccctgctgagactgaagggcttccccagcttccctctggtggagagacaggcaaatgaagtggactggtgggacatggtgtgtaacgtgaagaagctgatcaatgagaagaaggaggacggcaaagtgttctggcagaatctggccggctacaagcgtcaggaggccctgcggccctacctgagcagcgaggaagacagaaagaagggcaagaagttcgcccggtatcagctgggggacctgctgctgcacctcgagaagaagcacggcgaagactgggggaaggtgtacgatgaggcctgggagcggatcgataagaaggtggagggcctgagcaagcacatcaagctggaggaggaacggagatctgaggacgcccagagcaaggccgccctgaccgactggctgagagccaaggccagcttcgtcatcgaggggctgaaggaggccgacaaggacgagttctgccggtgcgaactgaagctgcagaagtggtacggagatctgagaggcaaacctttcgccatcgaggccgagaacagcatcctggacatcagcggcttcagcaagcagtacaactgcgcctttatttggcagaaggacggagtgaagaagctgaacctgtacctgatcatcaactatttcaagggcggcaagctgagattcaagaagatcaagcctgaagccttcgaggccaacagattctacaccgtgattaacaagaaaagcggagagatcgtgccaatggaagtgaacttcaacttcgacgaccctaacctgatcatcctgcccctggcatttggcaagcggcagggcagagagttcatctggaacgacctgctgtctctggagaccggcagcctgaagctggccaacggcagagtgatcgagaagacactgtacaacagacgaaccagacaagacgagcccgccctgtttgtggccctgaccttcgagagaagagaggtgctggacagcagcaatatcaagcctatgaacctgatcggcgtggaccggggcgagaacatccctgccgtgatcgcccttaccgaccccgagggatgccctctgagccggtttaaagacagcctgggcaaccctacccacatcctgagaattggcgagtcctacaaggagaagcagagaaccatccaggccaagaaggaggtggagcagcggcgggctggcggctactcccggaagtacgccagcaaggccaagaacctggccgacgacatggttagaaataccgccagagacctcctgtactacgctgtgacccaggacgccatgctgatcttcgagaacctgagcagaggcttcggcagacagggcaagagaaccttcatggccgagagacagtacacccggatggaggactggctgaccgccaagctggcctacgagggcctgccctctaagacctacctgtccaagaccttggcacagtacaccagcaagacatgctctaactgcggcttcacaatcacgagcgccgactacgaccgggtgctggagaaactgaagaagaccgccacaggctggatgaccaccattaacggcaaggagctgaaggtggagggccagatcacctactacaacaggtacaaacggcagaacgtggtgaaggacctgagcgtggaactggatagactgagcgaggaaagcgtaaacaatgacatcagcagctggaccaagggccggagcggcgaggccctgagcctgctgaagaagagattctcccacagaccagtgcaggagaagttcgtgtgtctgaactgcggcttcgagacccacgccgacgagcaagccgccctgaacatcgcccggtcttggcttttcctgcggagccaggagtacaagaagtaccagacaaacaagaccacaggcaacacagacaagagagccttcgtcgagacctggcagagcttctacagaaagaagctgaaggaggtgtggaagcctgccgtgggaagccccgctgccaagagagtgaagctggactaagctgccttctgcggggcttgccttctggccatgcccttcttctctcccttgcacctgtacctcttggtctttgaataaagcctgagtaggaagtctagaaaaaaaaaaaaaaaaaaaaaaaaaaaaaaaaaaaaaaaaaaaaaaaaaaaaaaaaaaaaaaaaaaaaaaaaaaaaaaaa

SEQ ID NO: 19756 - RNA, 3230 nt, synthetic construct
  source 1..3230: mol_type = other RNA
  modified_base 1..3230: mod_base = OTHER; note = Each t is m1f
aaataagagagaaaagaagagtaagaagaaatataagagccaccatggcccctgctgccaagagagtgaagctggatagcagacaggagatcaagcggattaataaaattcggagaagactggtgaaggattctaacacaaagaaggctggcaagacaggccctatgaagacactgctggtgagagtgatgacacccgacctgagagaaagactggaaaacctgagaaagaagcctgagaatatcccccagcccatcagcaacacaagccgggccaacctgaataagctgctgaccgactacaccgaaatgaagaaggccatcctgcacgtgtattgggaagagttccagaaagacccagtcggcctgatgagcagagtggctcagcctgccagcaagaagatcgatcagaacaagctgaagcccgaaatggacgagaaggggaacctgacaaccgccggctttgcctgtagccagtgcggccagcccctgtttgtgtacaaactggaacaggtgagcgaaaagggcaaggcttacacgaattacttcggcagatgcaacgtggccgagcacgagaagctgatcctgctggcccagctgaagcctgagaaggatagcgatgaggcagtgacatattccctgggcaagttcggacagcgggccctggatttttattccattcatgtgaccaaggaatccacccaccccgtcaagcctcttgcccaaattgccggcaacagatacgccagcggccccgtgggcaaggccctgagcgacgcctgtatgggcaccatcgccagcttcctgtctaagtaccaggacattatcatcgagcaccagaaggtggtgaagggcaaccagaagagactggagagcctgcgcgagctggccggcaaggaaaacctggagtatcctagcgtgaccctgcctcctcagcctcatacaaaggagggcgtggatgcctacaacgaagtgatcgcccgggtgcggatgtgggtgaacctgaatctgtggcagaagctgaagctgtctagagacgacgccaagcccctgctgagactgaagaagttccccagcttccctctggtggagagacaggcaaatgaagtggactggtgggacatggtgtgtaacgtgaagaagctgatcaatgagaagaaggaggacggcaaagtgttctggcagaatctggccggctacaagcgtcaggaggccctgcggccctacctgagcagcgaggaagacagaaagaagggcaagaagttcgcccggtatcagctgggggacctgctgctgcacctcgagaagaagcacggcgaagactgggggaaggtgtacgatgaggcctgggagcggatcgataagaaggtggagggcctgagcaagcacatcaagctggaggaggaacggagatctgaggacgcccagagcaaggccgccctgaccgactggctgagagccaaggccagcttcgtcatcgaggggctgaaggaggccgacaaggacgagttctgccggtgcgaactgaagctgcagaagtggtacggagatctgagaggcaaacctttcgccatcgaggccgagaacagcatcctggacatcagcggcttcagcaagcagtacaactgcgcctttatttggcagaaggacggagtgaagaagctgaacctgtacctgatcatcaactatttcaagggcggcaagctgagattcaagaagatcaagcctgaagccttcgaggccaacagattctacaccgtgattaacaagaaaagcggagagatcgtgccaatggaagtgaacttcaacttcgacgaccctaacctgatcatcctgcccctggcatttggcaagcggcagggcagagagttcatctggaacgacctgctgtctctggagaccggcagcctgaagctggccaacggcagagtgatcgagaagacactgtacaacagacgaaccagacaagacgagcccgccctgtttgtggccctgaccttcgagagaagagaggtgctggacagcagcaatatcaagcctatgaacctgatcggcgtggaccggggcgagaacatccctgccgtgatcgcccttaccgaccccgagggatgccctctgagccggtttaaagacagcctgggcaaccctacccacatcctgagaattggcgagtcctacaaggagaagcagagaaccatccaggccaagaaggaggtggagcagcggcgggctggcggctactcccggaagtacgccagcaaggccaagaacctggccgacgacatggttagaaataccgccagagacctcctgtactacgctgtgacccaggacgccatgctgatcttcgagaacctgagcagaggcttcggcagacagggcaagagaaccttcatggccgagagacagtacacccggatggaggactggctgaccgccaagctggcctacgagggcctgccctctaagacctacctgtccaagaccttggcacagtacaccagcaagacatgctctaactgcggcttcacaatcacgagcgccgactacgaccgggtgctggagaaactgaagaagaccgccacaggctggatgaccaccattaacggcaaggagctgaaggtggagggccagatcacctactacaacaggtacaaacggcagaacgtggtgaaggacctgagcgtggaactggatagactgagcgaggaaagcgtaaacaatgacatcagcagctggaccaagggccggagcggcgaggccctgagcctgctgaagaagagattctcccacagaccagtgcaggagaagttcgtgtgtctgaactgcggcttcgagacccacgccgacgagcaagccgccctgaacatcgcccggtcttggcttttcctgcggagccaggagtacaagaagtaccagacaaacaagaccacaggcaacacagacaagagagccttcgtcgagacctggcagagcttctacagaaagaagctgaaggaggtgtggaagcctgccgtgggaagccccgctgccaagagagtgaagctggactaagctgccttctgcggggcttgccttctggccatgcccttcttctctcccttgcacctgtacctcttggtctttgaataaagcctgagtaggaagtctagaaaaaaaaaaaaaaaaaaaaaaaaaaaaaaaaaaaaaaaaaaaaaaaaaaaaaaaaaaaaaaaaaaaaaaaaaaaaaaa

SEQ ID NO: 19757 - protein, 1002 aa, synthetic construct
MAPAAKRVKLDSRQEIKRINKIRRRLVKDSNTKKAGKTGPMKTLLVRVMTPDLRERLENLRKKPENIPQPISNTSRANLNKLLTDYTEMKKAILHVYWEEFQKDPVGLMSRVAQPASKKIDQNKLKPEMDEKGNLTTAGFACSQCGQPLFVYKLEQVSEKGKAYTNYFGRCNVAEHEKLILLAQLKPEKDSDEAVTYSLGKFGQRALDFYSIHVTKESTHPVKPLAQIAGNRYASGPVGKALSDACMGTIASFLSKYQDIIIEHQKVVKGNQKRLESLRELAGKENLEYPSVTLPPQPHTKEGVDAYNEVIARVRMWVNLNLWQKLKLSRDDAKPLLRLKGFPSFPLVERQANEVDWWDMVCNVKKLINEKKEDGKVFWQNLAGYKRQEALRPYLSSEEDRKKGKKFARYQLGDLLLHLEKKHGEDWGKVYDEAWERIDKKVEGLSKHIKLEEERRSEDAQSKAALTDWLRAKASFVIEGLKEADKDEFCRCELKLQKWYGDLRGKPFAIEAENSILDISGFSKQYNCAFIWQKDGVKKLNLYLIINYFKGGKLRFKKIKPEAFEANRFYTVINKKSGEIVPMEVNFNFDDPNLIILPLAFGKRQGREFIWNDLLSLETGSLKLANGRVIEKTLYNRRTRQDEPALFVALTFERREVLDSSNIKPMNLIGVDRGENIPAVIALTDPEGCPLSRFKDSLGNPTHILRIGESYKEKQRTIQAKKEVEQRRAGGYSRKYASKAKNLADDMVRNTARDLLYYAVTQDAMLIFENLSRGFGRQGKRTFMAERQYTRMEDWLTAKLAYEGLPSKTYLSKTLAQYTSKTCSNCGFTITSADYDRVLEKLKKTATGWMTTINGKELKVEGQITYYNRYKRQNVVKDLSVELDRLSEESVNNDISSWTKGRSGEALSLLKKRFSHRPVQEKFVCLNCGFETHADEQAALNIARSWLFLRSQEYKKYQTNKTTGNTDKRAFVETWQSFYRKKLKEVWKPAVGSPAAKRVKLD

SEQ ID NO: 19758 - protein, 1002 aa, synthetic construct
MAPAAKRVKLDSRQEIKRINKIRRRLVKDSNTKKAGKTGPMKTLLVRVMTPDLRERLENLRKKPENIPQPISNTSRANLNKLLTDYTEMKKAILHVYWEEFQKDPVGLMSRVAQPASKKIDQNKLKPEMDEKGNLTTAGFACSQCGQPLFVYKLEQVSEKGKAYTNYFGRCNVAEHEKLILLAQLKPEKDSDEAVTYSLGKFGQRALDFYSIHVTKESTHPVKPLAQIAGNRYASGPVGKALSDACMGTIASFLSKYQDIIIEHQKVVKGNQKRLESLRELAGKENLEYPSVTLPPQPHTKEGVDAYNEVIARVRMWVNLNLWQKLKLSRDDAKPLLRLKKFPSFPLVERQANEVDWWDMVCNVKKLINEKKEDGKVFWQNLAGYKRQEALRPYLSSEEDRKKGKKFARYQLGDLLLHLEKKHGEDWGKVYDEAWERIDKKVEGLSKHIKLEEERRSEDAQSKAALTDWLRAKASFVIEGLKEADKDEFCRCELKLQKWYGDLRGKPFAIEAENSILDISGFSKQYNCAFIWQKDGVKKLNLYLIINYFKGGKLRFKKIKPEAFEANRFYTVINKKSGEIVPMEVNFNFDDPNLIILPLAFGKRQGREFIWNDLLSLETGSLKLANGRVIEKTLYNRRTRQDEPALFVALTFERREVLDSSNIKPMNLIGVDRGENIPAVIALTDPEGCPLSRFKDSLGNPTHILRIGESYKEKQRTIQAKKEVEQRRAGGYSRKYASKAKNLADDMVRNTARDLLYYAVTQDAMLIFENLSRGFGRQGKRTFMAERQYTRMEDWLTAKLAYEGLPSKTYLSKTLAQYTSKTCSNCGFTITSADYDRVLEKLKKTATGWMTTINGKELKVEGQITYYNRYKRQNVVKDLSVELDRLSEESVNNDISSWTKGRSGEALSLLKKRFSHRPVQEKFVCLNCGFETHADEQAALNIARSWLFLRSQEYKKYQTNKTTGNTDKRAFVETWQSFYRKKLKEVWKPAVGSPAAKRVKLD

SEQ ID NO: 19759 - RNA, 109 nt, synthetic construct
  source 1..109: mol_type = other RNA
  modified_base 1..4: mod_base = OTHER; note = linked via phosphorothioate bond
  modified_base 106..109: mod_base = OTHER; note = linked via phosphorothioate bond
  modified_base 1: mod_base = OTHER; note = 2'-O-methyl adeonsine
  modified_base 2: mod_base = cm
  modified_base 3: mod_base = um
  modified_base 107: mod_base = cm
  modified_base 108: mod_base = gm
  modified_base 109: mod_base = OTHER; note = 2'-O-methyl adenosine
actggcgcttctatctgattactctgagcgccatcaccagcgactatgtcgtagtgggtaaagctccctcttcggagggagcatcagaggaggaggacggcctggccga

SEQ ID NO: 19760 - RNA, 109 nt, synthetic construct
  source 1..109: mol_type = other RNA
  modified_base 1..4: mod_base = OTHER; note = linked via phosphorothioate bond
  modified_base 106..109: mod_base = OTHER; note = linked via phosphorothioate bond
  modified_base 1: mod_base = OTHER; note = 2'-O-methyl adenosine
  modified_base 2: mod_base = cm
  modified_base 3: mod_base = um
  modified_base 107: mod_base = um
  modified_base 108: mod_base = gm
  modified_base 109: mod_base = OTHER; note = 2'-O-methyl adenosine
actggcgcttctatctgattactctgagcgccatcaccagcgactatgtcgtagtgggtaaagctccctcttcggagggagcatcagagtggcttcctggtgaagatga

SEQ ID NO: 19761 - RNA, 109 nt, synthetic construct
  source 1..109: mol_type = other RNA
actggcgcttttatctgattactttgagagccatcaccagcgactatgtcgtagtgggtaaagctccctcttcggagggagcatcaaagtcctggcttcctggtgaaga

SEQ ID NO: 19762 - RNA, 109 nt, synthetic construct; identical to SEQ ID NO: 19761
  modified_base 1..4: mod_base = OTHER; note = linked via phosphorothioate bond
  modified_base 1: mod_base = OTHER; note = 2'-O-methyladenosine
  modified_base 2: mod_base = cm
  modified_base 3: mod_base = um
  modified_base 107: mod_base = OTHER; note = 2'-O-methyladenosine
  modified_base 107..109: mod_base = OTHER; note = linked via phosphorothioate bond
  modified_base 108: mod_base = gm
  modified_base 109: mod_base = OTHER; note = 2'-O-methyladenosine
  source 1..109: mol_type = other RNA

SEQ ID NO: 19763 - RNA, 109 nt, synthetic construct
  source 1..109: mol_type = other RNA
actggcgcttttatctgattactttgagagccatcaccagcgactatgtcgtagtgggtaaagctccctcttcggagggagcatcaaagtggcttcctggtgaagatga

SEQ ID NO: 19764 - RNA, 109 nt, synthetic construct; identical to SEQ ID NO: 19763
  modified_base 1..4: mod_base = OTHER; note = linked via phosphorothioate bond
  modified_base 1: mod_base = OTHER; note = 2'-O-methyladenosine
  modified_base 2: mod_base = cm
  modified_base 3: mod_base = um
  modified_base 107: mod_base = um
  modified_base 107..109: mod_base = OTHER; note = linked via phosphorothioate bond
  modified_base 108: mod_base = gm
  modified_base 109: mod_base = OTHER; note = 2'-O-methyladenosine
  source 1..109: mol_type = other RNA

SEQ ID NO: 19765 - RNA, 109 nt, synthetic construct
  source 1..109: mol_type = other RNA
actggcgcttttatctgattactttgagagccatcaccagcgactatgtcgtagtgggtaaagctccctcttcggagggagcatcaaaggtgtagtacaagagatagaa

SEQ ID NO: 19766 - RNA, 109 nt, synthetic construct; identical to SEQ ID NO: 19765
  modified_base 1..4: mod_base = OTHER; note = linked via phosphorothioate bond
  modified_base 1: mod_base = OTHER; note = 2'-O-methyladenosine
  modified_base 2: mod_base = cm
  modified_base 3: mod_base = um
  modified_base 107: mod_base = gm
  modified_base 107..109: mod_base = OTHER; note = linked via phosphorothioate bond
  modified_base 108: mod_base = OTHER; note = 2'-O-methyladenosine
  modified_base 109: mod_base = OTHER; note = 2'-O-methyladenosine
  source 1..109: mol_type = other RNA

SEQ ID NO: 19767 - RNA, 109 nt, synthetic construct
  source 1..109: mol_type = other RNA
actggcgcttctatctgattactctgagcgccatcaccagcgactatgtcgtagtgggtaaagctccctcttcggagggagcatcagagtcctggcttcctggtgaaga

SEQ ID NO: 19768 - RNA, 109 nt, synthetic construct; identical to SEQ ID NO: 19767
  modified_base 1..4: mod_base = OTHER; note = linked via phosphorothioate bond
  modified_base 1: mod_base = OTHER; note = 2'-O-methyladenosine
  modified_base 2: mod_base = cm
  modified_base 3: mod_base = um
  modified_base 107: mod_base = OTHER; note = 2'-O-methyladenosine
  modified_base 107..109: mod_base = OTHER; note = linked via phosphorothioate bond
  modified_base 108: mod_base = gm
  modified_base 109: mod_base = OTHER; note = 2'-O-methyladenosine
  source 1..109: mol_type = other RNA

SEQ ID NO: 19769 - RNA, 109 nt, synthetic construct; identical to SEQ ID NO: 19760
  source 1..109: mol_type = other RNA

SEQ ID NO: 19770 - RNA, 109 nt, synthetic construct; identical to SEQ ID NO: 19760
  modified_base 1..4: mod_base = OTHER; note = linked via phosphorothioate bond
  modified_base 1: mod_base = OTHER; note = 2'-O-methyladenosine
  modified_base 2: mod_base = cm
  modified_base 3: mod_base = um
  modified_base 107: mod_base = um
  modified_base 107..109: mod_base = OTHER; note = linked via phosphorothioate bond
  modified_base 108: mod_base = gm
  modified_base 109: mod_base = OTHER; note = 2'-O-methyladenosine
  source 1..109: mol_type = other RNA

SEQ ID NO: 19771 - RNA, 109 nt, synthetic construct
  source 1..109: mol_type = other RNA
actggcgcttctatctgattactctgagcgccatcaccagcgactatgtcgtagtgggtaaagctccctcttcggagggagcatcagaggtgtagtacaagagatagaa

SEQ ID NO: 19772 - RNA, 109 nt, synthetic construct; identical to SEQ ID NO: 19771
  modified_base 1..4: mod_base = OTHER; note = linked via phosphorothioate bond
  modified_base 1: mod_base = OTHER; note = 2'-O-methyladenosine
  modified_base 2: mod_base = cm
  modified_base 3: mod_base = um
  modified_base 107: mod_base = gm
  modified_base 107..109: mod_base = OTHER; note = linked via phosphorothioate bond
  modified_base 108: mod_base = OTHER; note = 2'-O-methyladenosine
  modified_base 109: mod_base = OTHER; note = 2'-O-methyladenosine
  source 1..109: mol_type = other RNA

SEQ ID NO: 19773 - RNA, 107 nt, synthetic construct
  source 1..107: mol_type = other RNA
actggcgcttttatctgattactttgagagccatcaccagcgactatgtcgtagtgggtaaagctccctcttcggagggagcatcaaagggccgagatgtctcgctc

SEQ ID NO: 19774 - RNA, 107 nt, synthetic construct; identical to SEQ ID NO: 19773
  modified_base 1..4: mod_base = OTHER; note = linked via phosphorothioate bond
  modified_base 1: mod_base = OTHER; note = 2'-O-methyladenosine
  modified_base 2: mod_base = cm
  modified_base 3: mod_base = um
  modified_base 105: mod_base = cm
  modified_base 105..107: mod_base = OTHER; note = linked via phosphorothioate bond
  modified_base 106: mod_base = um
  modified_base 107: mod_base = cm
  source 1..107: mol_type = other RNA

SEQ ID NO: 19775 - RNA, 119 nt, synthetic construct
  source 1..119: mol_type = other RNA
actggcgcttctatctgattactctgagcgccatcaccagcgactatgtcgtagtgggtaaagccgcttacggacttcggtccgtaagaggcatcagagtcctggcttcctggtgaaga

SEQ ID NO: 19776 - RNA, 119 nt, synthetic construct; identical to SEQ ID NO: 19775
  modified_base 1..4: mod_base = OTHER; note = linked via phosphorothioate bond
  modified_base 1: mod_base = OTHER; note = 2'-O-methyladenosine
  modified_base 2: mod_base = cm
  modified_base 3: mod_base = um
  modified_base 117: mod_base = OTHER; note = 2'-O-methyladenosine
  modified_base 117..119: mod_base = OTHER; note = linked via phosphorothioate bond
  modified_base 118: mod_base = gm
  modified_base 119: mod_base = OTHER; note = 2'-O-methyladenosine
  source 1..119: mol_type = other RNA

SEQ ID NO: 19777 - RNA, 123 nt, synthetic construct
  modified_base 1..4: mod_base = OTHER; note = linked via phosphorothioate bond
  modified_base 1: mod_base = OTHER; note = 2'-O-methyladenosine
  modified_base 2: mod_base = cm
  modified_base 3: mod_base = um
  modified_base 120..123: mod_base = OTHER; note = linked via phosphorothioate bond
  modified_base 121: mod_base = um
  modified_base 122: mod_base = um
  modified_base 123: mod_base = um
  source 1..123: mol_type = other RNA
actggcgcttctatctgattactctgagcgccatcaccagcgactatgtcgtagtgggtaaagccgcttacggacttcggtccgtaagaggcatcagagtcctggcttcctggtgaagatttt

SEQ ID NO: 19778 - RNA, 119 nt, synthetic construct; identical to SEQ ID NO: 19775
  modified_base 1..4: mod_base = OTHER; note = linked via phosphorothioate bond
  modified_base 1: mod_base = OTHER; note = 2'-O-methyladenosine
  modified_base 2: mod_base = cm
  modified_base 3: mod_base = um
  modified_base 4: mod_base = gm
  modified_base 5: mod_base = gm
  modified_base 6: mod_base = cm
  modified_base 7: mod_base = gm
  modified_base 8: mod_base = cm
  modified_base 9: mod_base = um
  modified_base 10: mod_base = um
  modified_base 11: mod_base = cm
  modified_base 12: mod_base = um
  modified_base 13: mod_base = OTHER; note = 2'-O-methyladenosine
  modified_base 14: mod_base = um
  modified_base 15: mod_base = cm
  modified_base 16: mod_base = um
  modified_base 17: mod_base = gm
  modified_base 18: mod_base = OTHER; note = 2'-O-methyladenosine
  modified_base 19: mod_base = um
  modified_base 27: mod_base = OTHER; note = 2'-O-methyladenosine
  modified_base 28: mod_base = gm
  modified_base 29: mod_base = cm
  modified_base 30: mod_base = gm
  modified_base 31: mod_base = cm
  modified_base 32: mod_base = cm
  modified_base 33: mod_base = OTHER; note = 2'-O-methyladenosine
  modified_base 34: mod_base = um
  modified_base 35: mod_base = cm
  modified_base 36: mod_base = OTHER; note = 2'-O-methyladenosine
  modified_base 37: mod_base = cm
  modified_base 38: mod_base = cm
  modified_base 44: mod_base = cm
  modified_base 45: mod_base = um
  modified_base 48: mod_base = gm
  modified_base 49: mod_base = um
  modified_base 50: mod_base = cm
  modified_base 51: mod_base = gm
  modified_base 57: mod_base = gm
  modified_base 58: mod_base = gm
  modified_base 59: mod_base = um
  modified_base 60: mod_base = OTHER; note = 2'-O-methyladenosine
  modified_base 61: mod_base = OTHER; note = 2'-O-methyladenosine
  modified_base 62: mod_base = OTHER; note = 2'-O-methyladenosine
  modified_base 63: mod_base = gm
  modified_base 64: mod_base = cm
  modified_base 65: mod_base = cm
  modified_base 66: mod_base = gm
  modified_base 67: mod_base = cm
  modified_base 68: mod_base = um
  modified_base 69: mod_base = um
  modified_base 70: mod_base = OTHER; note = 2'-O-methyladenosine
  modified_base 71: mod_base = cm
  modified_base 72: mod_base = gm
  modified_base 73: mod_base = gm
  modified_base 74: mod_base = OTHER; note = 2'-O-methyladenosine
  modified_base 75: mod_base = cm
  modified_base 76: mod_base = um
  modified_base 77: mod_base = um
  modified_base 78: mod_base = cm
  modified_base 79: mod_base = gm
  modified_base 80: mod_base = gm
  modified_base 81: mod_base = um
  modified_base 82: mod_base = cm
  modified_base 83: mod_base = cm
  modified_base 84: mod_base = gm
  modified_base 85: mod_base = um
  modified_base 86: mod_base = OTHER; note = 2'-O-methyladenosine
  modified_base 87: mod_base = OTHER; note = 2'-O-methyladenosine
  modified_base 88: mod_base = gm
  modified_base 89: mod_base = OTHER; note = 2'-O-methyladenosine
  modified_base 90: mod_base = gm
  modified_base 91: mod_base = gm
  modified_base 92: mod_base = cm
  modified_base 93: mod_base = OTHER; note = 2'-O-methyladenosine
  modified_base 94: mod_base = um
  modified_base 95: mod_base = cm
  modified_base 96: mod_base = OTHER; note = 2'-O-methyladenosine
  modified_base 117: mod_base = OTHER; note = 2'-O-methyladenosine
  modified_base 117..119: mod_base = OTHER; note = linked via phosphorothioate bond
  modified_base 118: mod_base = gm
  modified_base 119: mod_base = OTHER; note = 2'-O-methyladenosine
  source 1..119: mol_type = other RNA

SEQ ID NO: 19779 - RNA, 119 nt, synthetic construct; identical to SEQ ID NO: 19775
  modified_base 1..4: mod_base = OTHER; note = linked via phosphorothioate bond
  modified_base 1: mod_base = OTHER; note = 2'-O-methyladenosine
  modified_base 2: mod_base = cm
  modified_base 3: mod_base = um
  modified_base 4: mod_base = gm
  modified_base 5: mod_base = gm
  modified_base 6: mod_base = cm
  modified_base 7: mod_base = gm
  modified_base 8: mod_base = cm
  modified_base 13: mod_base = OTHER; note = 2'-O-methyladenosine
  modified_base 14: mod_base = um
  modified_base 15: mod_base = cm
  modified_base 16: mod_base = um
  modified_base 17: mod_base = gm
  modified_base 18: mod_base = OTHER; note = 2'-O-methyladenosine
  modified_base 19: mod_base = um
  modified_base 27: mod_base = OTHER; note = 2'-O-methyladenosine
  modified_base 28: mod_base = gm
  modified_base 29: mod_base = cm
  modified_base 30: mod_base = gm
  modified_base 31: mod_base = cm
  modified_base 32: mod_base = cm
  modified_base 33: mod_base = OTHER; note = 2'-O-methyladenosine
  modified_base 34: mod_base = um
  modified_base 35: mod_base = cm
  modified_base 36: mod_base = OTHER; note = 2'-O-methyladenosine
  modified_base 37: mod_base = cm
  modified_base 38: mod_base = cm
  modified_base 44: mod_base = cm
  modified_base 45: mod_base = um
  modified_base 48: mod_base = gm
  modified_base 49: mod_base = um
  modified_base 50: mod_base = cm
  modified_base 51: mod_base = gm
  modified_base 57: mod_base = gm
  modified_base 58: mod_base = gm
  modified_base 59: mod_base = um
  modified_base 60: mod_base = OTHER; note = 2'-O-methyladenosine
  modified_base 61: mod_base = OTHER; note = 2'-O-methyladenosine
  modified_base 62: mod_base = OTHER; note = 2'-O-methyladenosine
  modified_base 63: mod_base = gm
  modified_base 64: mod_base = cm
  modified_base 65: mod_base = cm
  modified_base 66: mod_base = gm
  modified_base 67: mod_base = cm
  modified_base 68: mod_base = um
  modified_base 69: mod_base = um
  modified_base 70: mod_base = OTHER; note = 2'-O-methyladenosine
  modified_base 71: mod_base = cm
  modified_base 72: mod_base = gm
  modified_base 73: mod_base = gm
  modified_base 74: mod_base = OTHER; note = 2'-O-methyladenosine
  modified_base 75: mod_base = cm
  modified_base 76: mod_base = um
  modified_base 77: mod_base = um
  modified_base 78: mod_base = cm
  modified_base 79: mod_base = gm
  modified_base 80: mod_base = gm
  modified_base 81: mod_base = um
  modified_base 82: mod_base = cm
  modified_base 83: mod_base = cm
  modified_base 84: mod_base = gm
  modified_base 85: mod_base = um
  modified_base 86: mod_base = OTHER; note = 2'-O-methyladenosine
  modified_base 87: mod_base = OTHER; note = 2'-O-methyladenosine
  modified_base 88: mod_base = gm
  modified_base 89: mod_base = OTHER; note = 2'-O-methyladenosine
  modified_base 90: mod_base = gm
  modified_base 91: mod_base = gm
  modified_base 92: mod_base = cm
  modified_base 93: mod_base = OTHER; note = 2'-O-methyladenosine
  modified_base 94: mod_base = um
  modified_base 117: mod_base = OTHER; note = 2'-O-methyladenosine
  modified_base 117..119: mod_base = OTHER; note = linked via phosphorothioate bond
  modified_base 118: mod_base = gm
  modified_base 119: mod_base = OTHER; note = 2'-O-methyladenosine
  source 1..119: mol_type = other RNA

SEQ ID NO: 19780 - RNA, 119 nt, synthetic construct; identical to SEQ ID NO: 19775
  modified_base 1..4: mod_base = OTHER; note = linked via phosphorothioate bond
  modified_base 1: mod_base = OTHER; note = 2'-O-methyladenosine
  modified_base 2: mod_base = cm
  modified_base 3: mod_base = um
  modified_base 44: mod_base = cm
  modified_base 45: mod_base = um
  modified_base 48: mod_base = gm
  modified_base 49: mod_base = um
  modified_base 50: mod_base = cm
  modified_base 51: mod_base = gm
  modified_base 60: mod_base = OTHER; note = 2'-O-methyladenosine
  modified_base 61: mod_base = OTHER; note = 2'-O-methyladenosine
  modified_base 62: mod_base = OTHER; note = 2'-O-methyladenosine
  modified_base 63: mod_base = gm
  modified_base 64: mod_base = cm
  modified_base 65: mod_base = cm
  modified_base 66: mod_base = gm
  modified_base 67: mod_base = cm
  modified_base 68: mod_base = um
  modified_base 69: mod_base = um
  modified_base 70: mod_base = OTHER; note = 2'-O-methyladenosine
  modified_base 71: mod_base = cm
  modified_base 72: mod_base = gm
  modified_base 73: mod_base = gm
  modified_base 74: mod_base = OTHER; note = 2'-O-methyladenosine
  modified_base 75: mod_base = cm
  modified_base 76: mod_base = um
  modified_base 77: mod_base = um
  modified_base 78: mod_base = cm
  modified_base 79: mod_base = gm
  modified_base 80: mod_base = gm
  modified_base 81: mod_base = um
  modified_base 82: mod_base = cm
  modified_base 83: mod_base = cm
  modified_base 84: mod_base = gm
  modified_base 85: mod_base = um
  modified_base 86: mod_base = OTHER; note = 2'-O-methyladenosine
  modified_base 87: mod_base = OTHER; note = 2'-O-methyladenosine
  modified_base 88: mod_base = gm
  modified_base 89: mod_base = OTHER; note = 2'-O-methyladenosine
  modified_base 90: mod_base = gm
  modified_base 91: mod_base = gm
  modified_base 92: mod_base = cm
  modified_base 117: mod_base = OTHER; note = 2'-O-methyladenosine
  modified_base 117..119: mod_base = OTHER; note = linked via phosphorothioate bond
  modified_base 118: mod_base = gm
  modified_base 119: mod_base = OTHER; note = 2'-O-methyladenosine
  source 1..119: mol_type = other RNA

SEQ ID NO: 19781 - RNA, 119 nt, synthetic construct; identical to SEQ ID NO: 19775
  modified_base 1..4: mod_base = OTHER; note = linked via phosphorothioate bond
  modified_base 1: mod_base = OTHER; note = 2'-O-methyladenosine
  modified_base 2: mod_base = cm
  modified_base 3: mod_base = um
  modified_base 60: mod_base = OTHER; note = 2'-O-methyladenosine
  modified_base 61: mod_base = OTHER; note = 2'-O-methyladenosine
  modified_base 62: mod_base = OTHER; note = 2'-O-methyladenosine
  modified_base 63: mod_base = gm
  modified_base 64: mod_base = cm
  modified_base 65: mod_base = cm
  modified_base 66: mod_base = gm
  modified_base 67: mod_base = cm
  modified_base 68: mod_base = um
  modified_base 69: mod_base = um
  modified_base 70: mod_base = OTHER; note = 2'-O-methyladenosine
  modified_base 71: mod_base = cm
  modified_base 72: mod_base = gm
  modified_base 73: mod_base = gm
  modified_base 74: mod_base = OTHER; note = 2'-O-methyladenosine
  modified_base 75: mod_base = cm
  modified_base 76: mod_base = um
  modified_base 77: mod_base = um
  modified_base 78: mod_base = cm
  modified_base 79: mod_base = gm
  modified_base 80: mod_base = gm
  modified_base 81: mod_base = um
  modified_base 82: mod_base = cm
  modified_base 83: mod_base = cm
  modified_base 84: mod_base = gm
  modified_base 85: mod_base = um
  modified_base 86: mod_base = OTHER; note = 2'-O-methyladenosine
  modified_base 87: mod_base = OTHER; note = 2'-O-methyladenosine
  modified_base 88: mod_base = gm
  modified_base 89: mod_base = OTHER; note = 2'-O-methyladenosine
  modified_base 90: mod_base = gm
  modified_base 91: mod_base = gm
  modified_base 92: mod_base = cm
  modified_base 117: mod_base = OTHER; note = 2'-O-methyladenosine
  modified_base 117..119: mod_base = OTHER; note = linked via phosphorothioate bond
  modified_base 118: mod_base = gm
  modified_base 119: mod_base = OTHER; note = 2'-O-methyladenosine
  source 1..119: mol_type = other RNA

SEQ ID NO: 19782 - RNA, 119 nt, synthetic construct
  source 1..119: mol_type = other RNA
actggcgcttctatctgattactctgagcgccatcaccagcgactatgtcgtagtgggtaaagccgcttacggacttcggtccgtaagaggcatcagagtggcttcctggtgaagatga

SEQ ID NO: 19783 - RNA, 119 nt, synthetic construct; identical to SEQ ID NO: 19782
  modified_base 1..4: mod_base = OTHER; note = linked via phosphorothioate bond
  modified_base 1: mod_base = OTHER; note = 2'-O-methyladenosine
  modified_base 2: mod_base = cm
  modified_base 3: mod_base = um
  modified_base 117: mod_base = um
  modified_base 117..119: mod_base = OTHER; note = linked via phosphorothioate bond
  modified_base 118: mod_base = gm
  modified_base 119: mod_base = OTHER; note = 2'-O-methyladenosine
  source 1..119: mol_type = other RNA

SEQ ID NO: 19784 - RNA, 122 nt, synthetic construct
  modified_base 1..4: mod_base = OTHER; note = linked via phosphorothioate bond
  modified_base 1: mod_base = OTHER; note = 2'-O-methyladenosine
  modified_base 2: mod_base = cm
  modified_base 3: mod_base = um
  modified_base 119..122: mod_base = OTHER; note = linked via phosphorothioate bond
  modified_base 120: mod_base = um
  modified_base 121: mod_base = um
  modified_base 122: mod_base = um
  source 1..122: mol_type = other RNA
actggcgcttctatctgattactctgagcgccatcaccagcgactatgtcgtagtgggtaaagccgcttacggacttcggtccgtaagaggcatcagagtggcttcctggtgaagatgattt

SEQ ID NO: 19785 - RNA, 119 nt, synthetic construct; identical to SEQ ID NO: 19782
  modified_base 1..4: mod_base = OTHER; note = linked via phosphorothioate bond
  modified_base 1: mod_base = OTHER; note = 2'-O-methyladenosine
  modified_base 2: mod_base = cm
  modified_base 3: mod_base = um
  modified_base 4: mod_base = gm
  modified_base 5: mod_base = gm
  modified_base 6: mod_base = cm
  modified_base 7: mod_base = gm
  modified_base 8: mod_base = cm
  modified_base 9: mod_base = um
  modified_base 10: mod_base = um
  modified_base 11: mod_base = cm
  modified_base 12: mod_base = um
  modified_base 13: mod_base = OTHER; note = 2'-O-methyladenosine
  modified_base 14: mod_base = um
  modified_base 15: mod_base = cm
  modified_base 16: mod_base = um
  modified_base 17: mod_base = gm
  modified_base 18: mod_base = OTHER; note = 2'-O-methyladenosine
  modified_base 19: mod_base = um
  modified_base 27: mod_base = OTHER; note = 2'-O-methyladenosine
  modified_base 28: mod_base = gm
  modified_base 29: mod_base = cm
  modified_base 30: mod_base = gm
  modified_base 31: mod_base = cm
  modified_base 32: mod_base = cm
  modified_base 33: mod_base = OTHER; note = 2'-O-methyladenosine
  modified_base 34: mod_base = um
  modified_base 35: mod_base = cm
  modified_base 36: mod_base = OTHER; note = 2'-O-methyladenosine
  modified_base 37: mod_base = cm
  modified_base 38: mod_base = cm
  modified_base 44: mod_base = cm
  modified_base 45: mod_base = um
  modified_base 48: mod_base = gm
  modified_base 49: mod_base = um
  modified_base 50: mod_base = cm
  modified_base 51: mod_base = gm
  modified_base 57: mod_base = gm
  modified_base 58: mod_base = gm
  modified_base 59: mod_base = um
  modified_base 60: mod_base = OTHER; note = 2'-O-methyladenosine
  modified_base 61: mod_base = OTHER; note = 2'-O-methyladenosine
  modified_base 62: mod_base = OTHER; note = 2'-O-methyladenosine
  modified_base 63: mod_base = gm
  modified_base 64: mod_base = cm
  modified_base 65: mod_base = cm
  modified_base 66: mod_base = gm
  modified_base 67: mod_base = cm
  modified_base 68: mod_base = um
  modified_base 69: mod_base = um
  modified_base 70: mod_base = OTHER; note = 2'-O-methyladenosine
  modified_base 71: mod_base = cm
  modified_base 72: mod_base = gm
  modified_base 73: mod_base = gm
  modified_base 74: mod_base = OTHER; note = 2'-O-methyladenosine
  modified_base 75: mod_base = cm
  modified_base 76: mod_base = um
  modified_base 77: mod_base = um
  modified_base 78: mod_base = cm
  modified_base 79: mod_base = gm
  modified_base 80: mod_base = gm
  modified_base 81: mod_base = um
  modified_base 82: mod_base = cm
  modified_base 83: mod_base = cm
  modified_base 84: mod_base = gm
  modified_base 85: mod_base = um
  modified_base 86: mod_base = OTHER; note = 2'-O-methyladenosine
  modified_base 87: mod_base = OTHER; note = 2'-O-methyladenosine
  modified_base 88: mod_base = gm
  modified_base 89: mod_base = OTHER; note = 2'-O-methyladenosine
  modified_base 90: mod_base = gm
  modified_base 91: mod_base = gm
  modified_base 92: mod_base = cm
  modified_base 93: mod_base = OTHER; note = 2'-O-methyladenosine
  modified_base 94: mod_base = um
  modified_base 95: mod_base = cm
  modified_base 96: mod_base = OTHER; note = 2'-O-methyladenosine
  modified_base 117: mod_base = um
  modified_base 117..119: mod_base = OTHER; note = linked via phosphorothioate bond
  modified_base 118: mod_base = gm
  modified_base 119: mod_base = OTHER; note = 2'-O-methyladenosine
  source 1..119: mol_type = other RNA

SEQ ID NO: 19786 - RNA, 119 nt, synthetic construct; identical to SEQ ID NO: 19782
  modified_base 1..4: mod_base = OTHER; note = linked via phosphorothioate bond
  modified_base 1: mod_base = OTHER; note = 2'-O-methyladenosine
  modified_base 2: mod_base = cm
  modified_base 3: mod_base = um
  modified_base 4: mod_base = gm
  modified_base 5: mod_base = gm
  modified_base 6: mod_base = cm
  modified_base 7: mod_base = gm
  modified_base 8: mod_base = cm
  modified_base 13: mod_base = OTHER; note = 2'-O-methyladenosine
  modified_base 14: mod_base = um
  modified_base 15: mod_base = cm
  modified_base 16: mod_base = um
  modified_base 17: mod_base = gm
  modified_base 18: mod_base = OTHER; note = 2'-O-methyladenosine
  modified_base 19: mod_base = um
  modified_base 27: mod_base = OTHER; note = 2'-O-methyladenosine
  modified_base 28: mod_base = gm
  modified_base 29: mod_base = cm
  modified_base 30: mod_base = gm
  modified_base 31: mod_base = cm
  modified_base 32: mod_base = cm
  modified_base 33: mod_base = OTHER; note = 2'-O-methyladenosine
  modified_base 34: mod_base = um
  modified_base 35: mod_base = cm
  modified_base 36: mod_base = OTHER; note = 2'-O-methyladenosine
  modified_base 37: mod_base = cm
  modified_base 38: mod_base = cm
  modified_base 44: mod_base = cm
  modified_base 45: mod_base = um
  modified_base 48: mod_base = gm
  modified_base 49: mod_base = um
  modified_base 50: mod_base = cm
  modified_base 51: mod_base = gm
  modified_base 57: mod_base = gm
  modified_base 58: mod_base = gm
  modified_base 59: mod_base = um
  modified_base 60: mod_base = OTHER; note = 2'-O-methyladenosine
  modified_base 61: mod_base = OTHER; note = 2'-O-methyladenosine
  modified_base 62: mod_base = OTHER; note = 2'-O-methyladenosine
  modified_base 63: mod_base = gm
  modified_base 64: mod_base = cm
  modified_base 65: mod_base = cm
  modified_base 66: mod_base = gm
  modified_base 67: mod_base = cm
  modified_base 68: mod_base = um
  modified_base 69: mod_base = um
  modified_base 70: mod_base = OTHER; note = 2'-O-methyladenosine
  modified_base 71: mod_base = cm
  modified_base 72: mod_base = gm
  modified_base 73: mod_base = gm
  modified_base 74: mod_base = OTHER; note = 2'-O-methyladenosine
  modified_base 75: mod_base = cm
  modified_base 76: mod_base = um
  modified_base 77: mod_base = um
  modified_base 78: mod_base = cm
  modified_base 79: mod_base = gm
  modified_base 80: mod_base = gm
  modified_base 81: mod_base = um
  modified_base 82: mod_base = cm
  modified_base 83: mod_base = cm
  modified_base 84: mod_base = gm
  modified_base 85: mod_base = um
  modified_base 86: mod_base = OTHER; note = 2'-O-methyladenosine
  modified_base 87: mod_base = OTHER; note = 2'-O-methyladenosine
  modified_base 88: mod_base = gm
  modified_base 89: mod_base = OTHER; note = 2'-O-methyladenosine
  modified_base 90: mod_base = gm
  modified_base 91: mod_base = gm
  modified_base 92: mod_base = cm
  modified_base 93: mod_base = OTHER; note = 2'-O-methyladenosine
  modified_base 94: mod_base = um
  modified_base 117: mod_base = um
  modified_base 117..119: mod_base = OTHER; note = linked via phosphorothioate bond
  modified_base 118: mod_base = gm
  modified_base 119: mod_base = OTHER; note = 2'-O-methyladenosine
  source 1..119: mol_type = other RNA

SEQ ID NO: 19787 - RNA, 119 nt, synthetic construct; identical to SEQ ID NO: 19782
  modified_base 1..4: mod_base = OTHER; note = linked via phosphorothioate bond
  modified_base 1: mod_base = OTHER; note = 2'-O-methyladenosine
  modified_base 2: mod_base = cm
  modified_base 3: mod_base = um
  modified_base 44: mod_base = cm
  modified_base 45: mod_base = um
  modified_base 48: mod_base = gm
  modified_base 49: mod_base = um
  modified_base 50: mod_base = cm
  modified_base 51: mod_base = gm
  modified_base 60: mod_base = OTHER; note = 2'-O-methyladenosine
  modified_base 61: mod_base = OTHER; note = 2'-O-methyladenosine
  modified_base 62: mod_base = OTHER; note = 2'-O-methyladenosine
  modified_base 63: mod_base = gm
  modified_base 64: mod_base = cm
  modified_base 65: mod_base = cm
  modified_base 66: mod_base = gm
  modified_base 67: mod_base = cm
  modified_base 68: mod_base = um
  modified_base 69: mod_base = um
  modified_base 70: mod_base = OTHER; note = 2'-O-methyladenosine
  modified_base 71: mod_base = cm
  modified_base 72: mod_base = gm
  modified_base 73: mod_base = gm
  modified_base 74: mod_base = OTHER; note = 2'-O-methyladenosine
  modified_base 75: mod_base = cm
  modified_base 76: mod_base = um
  modified_base 77: mod_base = um
  modified_base 78: mod_base = cm
  modified_base 79: mod_base = gm
  modified_base 80: mod_base = gm
  modified_base 81: mod_base = um
  modified_base 82: mod_base = cm
  modified_base 83: mod_base = cm
  modified_base 84: mod_base = gm
  modified_base 85: mod_base = um
  modified_base 86: mod_base = OTHER; note = 2'-O-methyladenosine
  modified_base 87: mod_base = OTHER; note = 2'-O-methyladenosine
  modified_base 88: mod_base = gm
  modified_base 89: mod_base = OTHER; note = 2'-O-methyladenosine
  modified_base 90: mod_base = gm
  modified_base 91: mod_base = gm
  modified_base 92: mod_base = cm
  modified_base 117: mod_base = um
  modified_base 117..119: mod_base = OTHER; note = linked via phosphorothioate bond
  modified_base 118: mod_base = gm
  modified_base 119: mod_base = OTHER; note = 2'-O-methyladenosine
  source 1..119: mol_type = other RNA

SEQ ID NO: 19788 - RNA, 119 nt, synthetic construct; identical to SEQ ID NO: 19782
  modified_base 1..4: mod_base = OTHER; note = linked via phosphorothioate bond
  modified_base 1: mod_base = OTHER; note = 2'-O-methyladenosine
  modified_base 2: mod_base = cm
  modified_base 3: mod_base = um
  modified_base 60: mod_base = OTHER; note = 2'-O-methyladenosine
  modified_base 61: mod_base = OTHER; note = 2'-O-methyladenosine
  modified_base 62: mod_base = OTHER; note = 2'-O-methyladenosine
  modified_base 63: mod_base = gm
  modified_base 64: mod_base = cm
  modified_base 65: mod_base = cm
  modified_base 66: mod_base = gm
  modified_base 67: mod_base = cm
  modified_base 68: mod_base = um
  modified_base 69: mod_base = um
  modified_base 70: mod_base = OTHER; note = 2'-O-methyladenosine
  modified_base 71: mod_base = cm
  modified_base 72: mod_base = gm
  modified_base 73: mod_base = gm
  modified_base 74: mod_base = OTHER; note = 2'-O-methyladenosine
  modified_base 75: mod_base = cm
  modified_base 76: mod_base = um
  modified_base 77: mod_base = um
  modified_base 78: mod_base = cm
  modified_base 79: mod_base = gm
  modified_base 80: mod_base = gm
  modified_base 81: mod_base = um
  modified_base 82: mod_base = cm
  modified_base 83: mod_base = cm
  modified_base 84: mod_base = gm
  modified_base 85: mod_base = um
  modified_base 86: mod_base = OTHER; note = 2'-O-methyladenosine
  modified_base 87: mod_base = OTHER; note = 2'-O-methyladenosine
  modified_base 88: mod_base = gm
  modified_base 89: mod_base = OTHER; note = 2'-O-methyladenosine
  modified_base 90: mod_base = gm
  modified_base 91: mod_base = gm
  modified_base 92: mod_base = cm
  modified_base 117: mod_base = um
  modified_base 117..119: mod_base = OTHER; note = linked via phosphorothioate bond
  modified_base 118: mod_base = gm
  modified_base 119: mod_base = OTHER; note = 2'-O-methyladenosine
  source 1..119: mol_type = other RNA

SEQ ID NO: 19789 - RNA, 109 nt, synthetic construct
  source 1..109: mol_type = other RNA
actggcgcttctatctgattactctgagcgccatcaccagcgactatgtcgtagtgggtaaagctccctcttcggagggagcatcagagctggcttcttggtgaagatg

SEQ ID NO: 19790 - RNA, 109 nt, synthetic construct; identical to SEQ ID NO: 19789
  modified_base 1..4: mod_base = OTHER; note = linked via phosphorothioate bond
  modified_base 1: mod_base = OTHER; note = 2'-O-methyladenosine
  modified_base 2: mod_base = cm
  modified_base 3: mod_base = um
  modified_base 106..109: mod_base = OTHER; note = linked via phosphorothioate bond
  modified_base 107: mod_base = OTHER; note = 2'-O-methyladenosine
  modified_base 108: mod_base = um
  modified_base 109: mod_base = gm
  source 1..109: mol_type = other RNA

SEQ ID NO: 19791 - RNA, 109 nt, synthetic construct; identical to SEQ ID NO: 19789
  modified_base 1..4: mod_base = OTHER; note = linked via phosphorothioate bond
  modified_base 1: mod_base = OTHER; note = 2'-O-methyladenosine
  modified_base 2: mod_base = cm
  modified_base 3: mod_base = um
  modified_base 6: mod_base = cm
  modified_base 8: mod_base = cm
  modified_base 9: mod_base = um
  modified_base 14: mod_base = um
  modified_base 15: mod_base = cm
  modified_base 27: mod_base = OTHER; note = 2'-O-methyladenosine
  modified_base 28: mod_base = gm
  modified_base 33: mod_base = OTHER; note = 2'-O-methyladenosine
  modified_base 34: mod_base = um
  modified_base 35: mod_base = cm
  modified_base 36: mod_base = OTHER; note = 2'-O-methyladenosine
  modified_base 37: mod_base = cm
  modified_base 42: mod_base = gm
  modified_base 43: mod_base = OTHER; note = 2'-O-methyladenosine
  modified_base 44: mod_base = cm
  modified_base 45: mod_base = um
  modified_base 48: mod_base = gm
  modified_base 49: mod_base = um
  modified_base 50: mod_base = cm
  modified_base 51: mod_base = gm
  modified_base 58: mod_base = gm
  modified_base 59: mod_base = um
  modified_base 60: mod_base = OTHER; note = 2'-O-methyladenosine
  modified_base 61: mod_base = OTHER; note = 2'-O-methyladenosine
  modified_base 63: mod_base = gm
  modified_base 64: mod_base = cm
  modified_base 65: mod_base = um
  modified_base 66: mod_base = cm
  modified_base 67: mod_base = cm
  modified_base 68: mod_base = cm
  modified_base 69: mod_base = um
  modified_base 70: mod_base = cm
  modified_base 71: mod_base = um
  modified_base 72: mod_base = um
  modified_base 73: mod_base = cm
  modified_base 74: mod_base = gm
  modified_base 75: mod_base = gm
  modified_base 76: mod_base = OTHER; note = 2'-O-methyladenosine
  modified_base 77: mod_base = gm
  modified_base 78: mod_base = gm
  modified_base 79: mod_base = gm
  modified_base 80: mod_base = OTHER; note = 2'-O-methyladenosine
  modified_base 81: mod_base = gm
  modified_base 82: mod_base = cm
  modified_base 83: mod_base = OTHER; note = 2'-O-methyladenosine
  modified_base 84: mod_base = um
  modified_base 106..109: mod_base = OTHER; note = linked via phosphorothioate bond
  modified_base 107: mod_base = OTHER; note = 2'-O-methyladenosine
  modified_base 108: mod_base = um
  modified_base 109: mod_base = gm
  source 1..109: mol_type = other RNA

SEQ ID NO: 19792 - RNA, 109 nt, synthetic construct; identical to SEQ ID NO: 19789
  modified_base 1..4: mod_base = OTHER; note = linked via phosphorothioate bond
  modified_base 1: mod_base = OTHER; note = 2'-O-methyladenosine
  modified_base 2: mod_base = cm
  modified_base 3: mod_base = um
  modified_base 33: mod_base = OTHER; note = 2'-O-methyladenosine
  modified_base 34: mod_base = um
  modified_base 35: mod_base = cm
  modified_base 36: mod_base = OTHER; note = 2'-O-methyladenosine
  modified_base 37: mod_base = cm
  modified_base 42: mod_base = gm
  modified_base 43: mod_base = OTHER; note = 2'-O-methyladenosine
  modified_base 44: mod_base = cm
  modified_base 45: mod_base = um
  modified_base 48: mod_base = gm
  modified_base 49: mod_base = um
  modified_base 50: mod_base = cm
  modified_base 51: mod_base = gm
  modified_base 58: mod_base = gm
  modified_base 59: mod_base = um
  modified_base 60: mod_base = OTHER; note = 2'-O-methyladenosine
  modified_base 61: mod_base = OTHER; note = 2'-O-methyladenosine
  modified_base 63: mod_base = gm
  modified_base 64: mod_base = cm
  modified_base 65: mod_base = um
  modified_base 66: mod_base = cm
  modified_base 67: mod_base = cm
  modified_base 68: mod_base = cm
  modified_base 69: mod_base = um
  modified_base 70: mod_base = cm
  modified_base 71: mod_base = um
  modified_base 72: mod_base = um
  modified_base 73: mod_base = cm
  modified_base 74: mod_base = gm
  modified_base 75: mod_base = gm
  modified_base 76: mod_base = OTHER; note = 2'-O-methyladenosine
  modified_base 77: mod_base = gm
  modified_base 78: mod_base = gm
  modified_base 79: mod_base = gm
  modified_base 80: mod_base = OTHER; note = 2'-O-methyladenosine
  modified_base 81: mod_base = gm
  modified_base 82: mod_base = cm
  modified_base 83: mod_base = OTHER; note = 2'-O-methyladenosine
  modified_base 84: mod_base = um
  modified_base 106..109: mod_base = OTHER; note = linked via phosphorothioate bond
  modified_base 107: mod_base = OTHER; note = 2'-O-methyladenosine
  modified_base 108: mod_base = um
  modified_base 109: mod_base = gm
  source 1..109: mol_type = other RNA

SEQ ID NO: 19793 - RNA, 109 nt, synthetic construct; identical to SEQ ID NO: 19789
  modified_base 1..4: mod_base = OTHER; note = linked via phosphorothioate bond
  modified_base 1: mod_base = OTHER; note = 2'-O-methyladenosine
  modified_base 2: mod_base = cm
  modified_base 3: mod_base = um
  modified_base 6: mod_base = cm
  modified_base 8: mod_base = cm
  modified_base 9: mod_base = um
  modified_base 14: mod_base = um
  modified_base 15: mod_base = cm
  modified_base 27: mod_base = OTHER; note = 2'-O-methyladenosine
  modified_base 28: mod_base = gm
  modified_base 42: mod_base = gm
  modified_base 43: mod_base = OTHER; note = 2'-O-methyladenosine
  modified_base 44: mod_base = cm
  modified_base 45: mod_base = um
  modified_base 48: mod_base = gm
  modified_base 49: mod_base = um
  modified_base 50: mod_base = cm
  modified_base 51: mod_base = gm
  modified_base 63: mod_base = gm
  modified_base 64: mod_base = cm
  modified_base 65: mod_base = um
  modified_base 66: mod_base = cm
  modified_base 67: mod_base = cm
  modified_base 68: mod_base = cm
  modified_base 69: mod_base = um
  modified_base 70: mod_base = cm
  modified_base 71: mod_base = um
  modified_base 72: mod_base = um
  modified_base 73: mod_base = cm
  modified_base 74: mod_base = gm
  modified_base 75: mod_base = gm
  modified_base 76: mod_base = OTHER; note = 2'-O-methyladenosine
  modified_base 77: mod_base = gm
  modified_base 78: mod_base = gm
  modified_base 79: mod_base = gm
  modified_base 80: mod_base = OTHER; note = 2'-O-methyladenosine
  modified_base 81: mod_base = gm
  modified_base 82: mod_base = cm
  modified_base 105..109: mod_base = OTHER; note = linked via phosphorothioate bond
  modified_base 106: mod_base = gm
  modified_base 107: mod_base = OTHER; note = 2'-O-methyladenosine
  modified_base 108: mod_base = um
  modified_base 109: mod_base = gm
  source 1..109: mol_type = other RNA

SEQ ID NO: 19794 - RNA, 109 nt, synthetic construct
  source 1..109: mol_type = other RNA
actggcgcttttatctgattactttgagagccatcaccagcgactatgtcgtagtgggtaaagctccctcttcggagggagcatcaaagagaagatgggcgggagtctt

SEQ ID NO: 19795 - RNA, 112 nt, synthetic construct
  modified_base 1..4: mod_base = OTHER; note = linked via phosphorothioate bond
  modified_base 1: mod_base = OTHER; note = 2'-O-methyladenosine
  modified_base 2: mod_base = cm
  modified_base 3: mod_base = um
  modified_base 109..112: mod_base = OTHER; note = linked via phosphorothioate bond
  modified_base 110: mod_base = um
  modified_base 111: mod_base = um
  modified_base 112: mod_base = um
  source 1..112: mol_type = other RNA
actggcgcttttatctgattactttgagagccatcaccagcgactatgtcgtagtgggtaaagctccctcttcggagggagcatcaaagagaagatgggcgggagtcttttt

SEQ ID NO: 19796 - RNA, 109 nt, synthetic construct
  source 1..109: mol_type = other RNA
actggcgcttctatctgattactctgagcgccatcaccagcgactatgtcgtagtgggtaaagctccctcttcggagggagcatcagagagaagatgggcgggagtctt

SEQ ID NO: 19797 - RNA, 109 nt, synthetic construct; identical to SEQ ID NO: 19796
  modified_base 1..4: mod_base = OTHER; note = linked via phosphorothioate bond
  modified_base 1: mod_base = OTHER; note = 2'-O-methyladenosine
  modified_base 2: mod_base = cm
  modified_base 3: mod_base = um
  modified_base 106..109: mod_base = OTHER; note = linked via phosphorothioate bond
  modified_base 107: mod_base = cm
  modified_base 108: mod_base = um
  modified_base 109: mod_base = um
  source 1..109: mol_type = other RNA

SEQ ID NO: 19798 - RNA, 109 nt, synthetic construct; identical to SEQ ID NO: 19796
  modified_base 1..4: mod_base = OTHER; note = linked via phosphorothioate bond
  modified_base 1: mod_base = OTHER; note = 2'-O-methyladenosine
  modified_base 2: mod_base = cm
  modified_base 3: mod_base = um
  modified_base 44: mod_base = cm
  modified_base 45: mod_base = um
  modified_base 48: mod_base = gm
  modified_base 49: mod_base = um
  modified_base 50: mod_base = cm
  modified_base 51: mod_base = gm
  modified_base 63: mod_base = gm
  modified_base 64: mod_base = cm
  modified_base 65: mod_base = um
  modified_base 66: mod_base = cm
  modified_base 67: mod_base = cm
  modified_base 68: mod_base = cm
  modified_base 69: mod_base = um
  modified_base 70: mod_base = cm
  modified_base 71: mod_base = um
  modified_base 72: mod_base = um
  modified_base 73: mod_base = cm
  modified_base 74: mod_base = gm
  modified_base 75: mod_base = gm
  modified_base 76: mod_base = OTHER; note = 2'-O-methyladenosine
  modified_base 77: mod_base = gm
  modified_base 78: mod_base = gm
  modified_base 79: mod_base = gm
  modified_base 80: mod_base = OTHER; note = 2'-O-methyladenosine
  modified_base 81: mod_base = gm
  modified_base 82: mod_base = cm
  modified_base 106..109: mod_base = OTHER; note = linked via phosphorothioate bond
  modified_base 107: mod_base = cm
  modified_base 108: mod_base = um
  modified_base 109: mod_base = um
  source 1..109: mol_type = other RNA

SEQ ID NO: 19799 - DNA, 60 bp, synthetic construct
  source 1..60: mol_type = other DNA
  misc_feature 1: note = IRDye700 moiety conjugated
catgtcttccatggccttcttcctggcttcctggtgaagatgagtggcgacctgctggag

SEQ ID NO: 19800 - DNA, 60 bp, synthetic construct
  source 1..60: mol_type = other DNA
  misc_feature 1: note = IRDye800 moiety conjugated
ctccagcaggtcgccactcatcttcaccaggaagccaggaagaaggccatggaagacatg

SEQ ID NO: 19801 - DNA, 14 bp, synthetic construct
  source 1..14: mol_type = other DNA
gaccggccgccacc

SEQ ID NO: 19802 - DNA, 39 bp, synthetic construct
  source 1..39: mol_type = other DNA
atggccccagcggccaaacgggtgaagctggactctaga

SEQ ID NO: 19803 - DNA, 2931 bp, synthetic construct
  source 1..2931: mol_type = other DNA
caagagatcaagagaatcaacaagatcagaaggagactggtcaaggacagcaacacaaagaaggccggcaagacaggccccatgaaaaccctgctcgtcagagtgatgacccctgacctgagagagcggctggaaaacctgagaaagaagcccgagaacatccctcagcctatcagcaacaccagcagggccaacctgaacaagctgctgaccgactacaccgagatgaagaaagccatcctgcacgtgtactgggaagagttccagaaagaccccgtgggcctgatgagcagagttgctcagcctgccagcaagaagatcgaccagaacaagctgaagcccgagatggacgagaagggcaatctgaccacagccggctttgcctgctctcagtgtggccagcctctgttcgtgtacaagctggaacaggtgtccgagaaaggcaaggcctacaccaactacttcggcagatgtaacgtggccgagcacgagaagctgattctgctggcccagctgaaacctgagaaggactctgatgaggccgtgacctacagcctgggcaagtttggacagagagccctggacttctacagcatccacgtgaccaaagaaagcacacaccccgtgaagcccctggctcagatcgccggcaatagatacgcctctggacctgtgggcaaagccctgtccgatgcctgcatgggaacaatcgccagcttcctgagcaagtaccaggacatcatcatcgagcaccagaaggtggtcaagggcaaccagaagagactggaaagcctgagggagctggccggcaaagagaacctggaataccccagcgtgaccctgcctcctcagcctcacacaaaagaaggcgtggacgcctacaacgaagtgatcgccagagtgagaatgtgggtcaacctgaacctgtggcagaagctgaaactgtccagggacgacgccaagcctctgctgagactgaagggcttccctagcttccctctggtggaaagacaggccaatgaagtggattggtgggacatggtctgcaacgtgaagaagctgatcaacgagaagaaagaggatggcaaggttttctggcagaacctggccggctacaagagacaagaagccctgaggccttacctgagcagcgaagaggaccggaagaagggcaagaagttcgccagataccagctgggcgacctgctgctgcacctggaaaagaagcacggcgaggactggggcaaagtgtacgatgaggcctgggagagaatcgacaagaaggtggaaggcctgagcaagcacattaagctggaagaggaaagaaggagcgaggacgcccaatctaaagccgctctgaccgattggctgagagccaaggccagctttgtgatcgagggcctgaaagaggccgacaaggacgagttctgcagatgcgagctgaagctgcagaagtggtacggcgatctgagaggcaagcccttcgccattgaggccgagaacagcatcctggacatcagcggcttcagcaagcagtacaactgcgccttcatttggcagaaagacggcgtcaagaaactgaacctgtacctgatcatcaattacttcaaaggcggcaagctgcggttcaagaagatcaaacccgaggccttcgaggctaacagattctacaccgtgatcaacaaaaagtccggcgagatcgtgcccatggaagtgaacttcaacttcgacgaccccaacctgattatcctgcctctggccttcggcaagagacagggcagagagttcatctggaacgatctgctgagcctggaaaccggctctctgaagctggccaatggcagagtgatcgagaaaaccctgtacaacaggagaaccagacaggacgagcctgctctgtttgtggccctgaccttcgagagaagagaggtgctggacagcagcaacatcaagcccatgaacctgatcggcgtggaccggggcgagaatatccctgctgtgatcgccctgacagaccctgaaggatgcccactgagcagattcaaggactccctgggcaaccctacacacatcctgagaatcggcgagagctacaaagagaagcagaggacaatccaggccaagaaagaggtggaacagcgcagagccggcggatactctaggaagtacgccagcaaggccaagaatctggccgacgacatggtccgaaacaccgccagagatctgctgtactacgccgtgacacaggacgccatgctgatcttcgagaatctgagcagaggcttcggccggcagggcaagagaacctttatggccgagaggcagtacaccagaatggaagattggctcacagctaaactggcctacgagggactgagcaagacctacctgtccaaaacactggcccagtatacctccaagacctgcagcaattgcggcttcaccatcaccagcgccgactacgacagagtgctggaaaagctcaagaaaaccgccaccggctggatgaccaccatcaacggcaaagagctgaaggttgagggccagatcacctactacaacaggtacaagaggcagaacgtcgtgaaggatctgagcgtggaactggacagactgagcgaagagagcgtgaacaacgacatcagcagctggacaaagggcagatcaggcgaggctctgagcctgctgaagaagaggtttagccacagacctgtgcaagagaagttcgtgtgcctgaactgcggcttcgagacacacgccgatgaacaggctgccctgaacattgccagaagctggctgttcctgagaagccaagagtacaagaagtaccagaccaacaagaccaccggcaacaccgacaagagggcctttgtggaaacctggcagagcttctacagaaaaaagctgaaagaagtctggaagcccgccgtg

SEQ ID NO: 19804 - DNA, 42 bp, synthetic construct
  source 1..42: mol_type = other DNA
ggctcccccgccgcgaagcgagtgaaactggacggatccggc

SEQ ID NO: 19805 - DNA, 756 bp, synthetic construct
  source 1..756: mol_type = other DNA
gcaacaaacttctctctgctgaaacaagccggagatgtcgaagagaatcctggaccgatggtatcaaagggtgaggcggtcattaaggaattcatgcggttcaaagttcacatggaggggagtatgaatggtcacgaatttgagatcgagggtgagggagagggtagaccttacgaaggcacccagacagcaaaactcaaagtcactaagggcggcccactccctttctcatgggatatactgagtcctcaatttatgtatggctcccgggcctttatcaagcatccagccgacatacccgattactataaacagtcattccccgagggattcaaatgggagagagtgatgaattttgaagacgggggtgccgtgaccgtaactcaagatacctctttggaagatggtaccctcatttacaaggttaagcttagaggaactaatttcccaccagacggacccgttatgcagaaaaaaaccatgggttgggaggctagcaccgaacggctgtatccagaggatggagttttgaaaggtgatattaagatggccctgcgcctgaaagacggagggcggtacctcgcagatttcaaaactacctacaaagctaagaaaccggtccaaatgccgggtgcttataacgtcgataggaagctggatataacatcacacaacgaagactatacggttgtcgaacagtatgagcgatctgaggggaggcacagcacgggcgggatggatgagctttacaagtga

SEQ ID NO: 19806 - DNA, 20 bp, synthetic construct
  source 1..20: mol_type = other DNA
gtcaccaggcattgtgtcag

SEQ ID NO: 19807 - DNA, 20 bp, synthetic construct
  source 1..20: mol_type = other DNA
tcagaagaagcctctgtgct

SEQ ID NO: 19808 - DNA, 20 bp, synthetic construct
  source 1..20: mol_type = other DNA
tgtgatagtggtggagagtg

SEQ ID NO: 19809 - DNA, 20 bp, synthetic construct
  source 1..20: mol_type = other DNA
gaaggaggccctaggcttgg

SEQ ID NO: 19810 - DNA, 20 bp, synthetic construct
  source 1..20: mol_type = other DNA
agggacaaataaatgggcag

SEQ ID NO: 19811 - DNA, 20 bp, synthetic construct
  source 1..20: mol_type = other DNA
agcagtgagcagcagtcagc

SEQ ID NO: 19812 - DNA, 20 bp, synthetic construct
  source 1..20: mol_type = other DNA
caataacaaggagctgggct

SEQ ID NO: 19813 - RNA, 2931 nt, synthetic construct; identical to SEQ ID NO: 19699
  source 1..2931: mol_type = other RNA
  modified_base 1..2931: mod_base = OTHER; note = each t is m1f

SEQ ID NO: 19814 - RNA, 2934 nt, synthetic construct; identical to SEQ ID NO: 19700
  source 1..2934: mol_type = other RNA
  modified_base 1..2934: mod_base = OTHER; note = each t is m1f

SEQ ID NO: 19815 - RNA, 2937 nt, synthetic construct; identical to SEQ ID NO: 19701
  source 1..2937: mol_type = other RNA
  modified_base 1..2937: mod_base = OTHER; note = each t is m1f

SEQ ID NO: 19816 - DNA, 2931 bp, synthetic construct
  source 1..2931: mol_type = other DNA
caggagatcaagcggattaataaaattcggagaagactggtgaaggattctaacacaaagaaggctggcaagacaggccctatgaagacactgctggtgagagtgatgacacccgacctgagagaaagactggaaaacctgagaaagaagcctgagaatatcccccagcccatcagcaacacaagccgggccaacctgaataagctgctgaccgactacaccgaaatgaagaaggccatcctgcacgtgtattgggaagagttccagaaagacccagtcggcctgatgagcagagtggctcagcctgccagcaagaagatcgatcagaacaagctgaagcccgaaatggacgagaaggggaacctgacaaccgccggctttgcctgtagccagtgcggccagcccctgtttgtgtacaaactggaacaggtgagcgaaaagggcaaggcttacacgaattacttcggcagatgcaacgtggccgagcacgagaagctgatcctgctggcccagctgaagcctgagaaggatagcgatgaggcagtgacatattccctgggcaagttcggacagcgggccctggatttttattccattcatgtgaccaaggaatccacccaccccgtcaagcctcttgcccaaattgccggcaacagatacgccagcggccccgtgggcaaggccctgagcgacgcctgtatgggcaccatcgccagcttcctgtctaagtaccaggacattatcatcgagcaccagaaggtggtgaagggcaaccagaagagactggagagcctgcgcgagctggccggcaaggaaaacctggagtatcctagcgtgaccctgcctcctcagcctcatacaaaggagggcgtggatgcctacaacgaagtgatcgcccgggtgcggatgtgggtgaacctgaatctgtggcagaagctgaagctgtctagagacgacgccaagcccctgctgagactgaagggcttccccagcttccctctggtggagagacaggcaaatgaagtggactggtgggacatggtgtgtaacgtgaagaagctgatcaatgagaagaaggaggacggcaaagtgttctggcagaatctggccggctacaagcgtcaggaggccctgcggccctacctgagcagcgaggaagacagaaagaagggcaagaagttcgcccggtatcagctgggggacctgctgctgcacctcgagaagaagcacggcgaagactgggggaaggtgtacgatgaggcctgggagcggatcgataagaaggtggagggcctgagcaagcacatcaagctggaggaggaacggagatctgaggacgcccagagcaaggccgccctgaccgactggctgagagccaaggccagcttcgtcatcgaggggctgaaggaggccgacaaggacgagttctgccggtgcgaactgaagctgcagaagtggtacggagatctgagaggcaaacctttcgccatcgaggccgagaacagcatcctggacatcagcggcttcagcaagcagtacaactgcgcctttatttggcagaaggacggagtgaagaagctgaacctgtacctgatcatcaactatttcaagggcggcaagctgagattcaagaagatcaagcctgaagccttcgaggccaacagattctacaccgtgattaacaagaaaagcggagagatcgtgccaatggaagtgaacttcaacttcgacgaccctaacctgatcatcctgcccctggcatttggcaagcggcagggcagagagttcatctggaacgacctgctgtctctggagaccggcagcctgaagctggccaacggcagagtgatcgagaagacactgtacaacagacgaaccagacaagacgagcccgccctgtttgtggccctgaccttcgagagaagagaggtgctggacagcagcaatatcaagcctatgaacctgatcggcgtggaccggggcgagaacatccctgccgtgatcgcccttaccgaccccgagggatgccctctgagccggtttaaagacagcctgggcaaccctacccacatcctgagaattggcgagtcctacaaggagaagcagagaaccatccaggccaagaaggaggtggagcagcggcgggctggcggctactcccggaagtacgccagcaaggccaagaacctggccgacgacatggttagaaataccgccagagacctcctgtactacgctgtgacccaggacgccatgctgatcttcgagaacctgagcagaggcttcggcagacagggcaagagaaccttcatggccgagagacagtacacccggatggaggactggctgaccgccaagctggcctacgagggcctgtctaagacctacctgtccaagaccttggcacagtacaccagcaagacatgctctaactgcggcttcacaatcacgagcgccgactacgaccgggtgctggagaaactgaagaagaccgccacaggctggatgaccaccattaacggcaaggagctgaaggtggagggccagatcacctactacaacaggtacaaacggcagaacgtggtgaaggacctgagcgtggaactggatagactgagcgaggaaagcgtaaacaatgacatcagcagctggaccaagggccggagcggcgaggccctgagcctgctgaagaagagattctcccacagaccagtgcaggagaagttcgtgtgtctgaactgcggcttcgagacccacgccgacgagcaagccgccctgaacatcgcccggtcttggcttttcctgcggagccaggagtacaagaagtaccagacaaacaagaccacaggcaacacagacaagagagccttcgtcgagacctggcagagcttctacagaaagaagctgaaggaggtgtggaagcctgccgtg

SEQ ID NO: 19817 - RNA, 2931 nt, synthetic construct; identical to SEQ ID NO: 19699
  source 1..2931: mol_type = other RNA
  modified_base 1..2931: mod_base = OTHER; note = each t is m1f

SEQ ID NO: 19818 - RNA, 2934 nt, synthetic construct; identical to SEQ ID NO: 19700
  source 1..2934: mol_type = other RNA
  modified_base 1..2934: mod_base = OTHER; note = each t is m1f

SEQ ID NO: 19819 - RNA, 2937 nt, synthetic construct; identical to SEQ ID NO: 19701
  source 1..2937: mol_type = other RNA
  modified_base 1..2937: mod_base = OTHER; note = each t is m1f

SEQ ID NO: 19820 - RNA, 2934 nt, synthetic construct; identical to SEQ ID NO: 19702
  source 1..2934: mol_type = other RNA
  modified_base 1..2934: mod_base = OTHER; note = each t is m1f

SEQ ID NO: 19821 - RNA, 38 nt, synthetic construct
  source 1..38: mol_type = other RNA
aaataagagagaaaagaagagtaagaagaaatataaga

SEQ ID NO: 19822 - RNA, 38 nt, synthetic construct; identical to SEQ ID NO: 19821
  source 1..38: mol_type = other RNA
  modified_base 1..38: mod_base = OTHER; note = each t is m1f

SEQ ID NO: 19823 - DNA, 38 bp, synthetic construct
  source 1..38: mol_type = other DNA
aaataagagagaaaagaagagtaagaagaaatataaga

SEQ ID NO: 19824 - RNA, 93 nt, synthetic construct
  source 1..93: mol_type = other RNA
gctgccttctgcggggcttgccttctggccatgcccttcttctctcccttgcacctgtacctcttggtctttgaataaagcctgagtaggaag

SEQ ID NO: 19825 - RNA, 93 nt, synthetic construct; identical to SEQ ID NO: 19824
  source 1..93: mol_type = other RNA
  modified_base 1..93: mod_base = OTHER; note = each t is m1f

SEQ ID NO: 19826 - RNA, 79 nt, synthetic construct
  source 1..79: mol_type = other RNA
aaaaaaaaaaaaaaaaaaaaaaaaaaaaaaaaaaaaaaaaaaaaaaaaaaaaaaaaaaaaaaaaaaaaaaaaaaaaaaa

SEQ ID NO: 19827-19829 - skipped (3 entries)

SEQ ID NO: 19830 - RNA, 3230 nt, synthetic construct
  source 1..3230: mol_type = other RNA
aggaaataagagagaaaagaagagtaagaagaaatataagagccaccatggcccctgctgccaagagagtgaagctggatagcagacaggagatcaagcggattaataaaattcggagaagactggtgaaggattctaacacaaagaaggctggcaagacaggccctatgaagacactgctggtgagagtgatgacacccgacctgagagaaagactggaaaacctgagaaagaagcctgagaatatcccccagcccatcagcaacacaagccgggccaacctgaataagctgctgaccgactacaccgaaatgaagaaggccatcctgcacgtgtattgggaagagttccagaaagacccagtcggcctgatgagcagagtggctcagcctgccagcaagaagatcgatcagaacaagctgaagcccgaaatggacgagaaggggaacctgacaaccgccggctttgcctgtagccagtgcggccagcccctgtttgtgtacaaactggaacaggtgagcgaaaagggcaaggcttacacgaattacttcggcagatgcaacgtggccgagcacgagaagctgatcctgctggcccagctgaagcctgagaaggatagcgatgaggcagtgacatattccctgggcaagttcggacagcgggccctggatttttattccattcatgtgaccaaggaatccacccaccccgtcaagcctcttgcccaaattgccggcaacagatacgccagcggccccgtgggcaaggccctgagcgacgcctgtatgggcaccatcgccagcttcctgtctaagtaccaggacattatcatcgagcaccagaaggtggtgaagggcaaccagaagagactggagagcctgcgcgagctggccggcaaggaaaacctggagtatcctagcgtgaccctgcctcctcagcctcatacaaaggagggcgtggatgcctacaacgaagtgatcgcccgggtgcggatgtgggtgaacctgaatctgtggcagaagctgaagctgtctagagacgacgccaagcccctgctgagactgaagggcttccccagcttccctctggtggagagacaggcaaatgaagtggactggtgggacatggtgtgtaacgtgaagaagctgatcaatgagaagaaggaggacggcaaagtgttctggcagaatctggccggctacaagcgtcaggaggccctgcggccctacctgagcagcgaggaagacagaaagaagggcaagaagttcgcccggtatcagctgggggacctgctgctgcacctcgagaagaagcacggcgaagactgggggaaggtgtacgatgaggcctgggagcggatcgataagaaggtggagggcctgagcaagcacatcaagctggaggaggaacggagatctgaggacgcccagagcaaggccgccctgaccgactggctgagagccaaggccagcttcgtcatcgaggggctgaaggaggccgacaaggacgagttctgccggtgcgaactgaagctgcagaagtggtacggagatctgagaggcaaacctttcgccatcgaggccgagaacagcatcctggacatcagcggcttcagcaagcagtacaactgcgcctttatttggcagaaggacggagtgaagaagctgaacctgtacctgatcatcaactatttcaagggcggcaagctgagattcaagaagatcaagcctgaagccttcgaggccaacagattctacaccgtgattaacaagaaaagcggagagatcgtgccaatggaagtgaacttcaacttcgacgaccctaacctgatcatcctgcccctggcatttggcaagcggcagggcagagagttcatctggaacgacctgctgtctctggagaccggcagcctgaagctggccaacggcagagtgatcgagaagacactgtacaacagacgaaccagacaagacgagcccgccctgtttgtggccctgaccttcgagagaagagaggtgctggacagcagcaatatcaagcctatgaacctgatcggcgtggaccggggcgagaacatccctgccgtgatcgcccttaccgaccccgagggatgccctctgagccggtttaaagacagcctgggcaaccctacccacatcctgagaattggcgagtcctacaaggagaagcagagaaccatccaggccaagaaggaggtggagcagcggcgggctggcggctactcccggaagtacgccagcaaggccaagaacctggccgacgacatggttagaaataccgccagagacctcctgtactacgctgtgacccaggacgccatgctgatcttcgagaacctgagcagaggcttcggcagacagggcaagagaaccttcatggccgagagacagtacacccggatggaggactggctgaccgccaagctggcctacgagggcctgtctaagacctacctgtccaagaccttggcacagtacaccagcaagacatgctctaactgcggcttcacaatcacgagcgccgactacgaccgggtgctggagaaactgaagaagaccgccacaggctggatgaccaccattaacggcaaggagctgaaggtggagggccagatcacctactacaacaggtacaaacggcagaacgtggtgaaggacctgagcgtggaactggatagactgagcgaggaaagcgtaaacaatgacatcagcagctggaccaagggccggagcggcgaggccctgagcctgctgaagaagagattctcccacagaccagtgcaggagaagttcgtgtgtctgaactgcggcttcgagacccacgccgacgagcaagccgccctgaacatcgcccggtcttggcttttcctgcggagccaggagtacaagaagtaccagacaaacaagaccacaggcaacacagacaagagagccttcgtcgagacctggcagagcttctacagaaagaagctgaaggaggtgtggaagcctgccgtgggaagccccgctgccaagagagtgaagctggactaagctgccttctgcggggcttgccttctggccatgcccttcttctctcccttgcacctgtacctcttggtctttgaataaagcctgagtaggaagtctagaaaaaaaaaaaaaaaaaaaaaaaaaaaaaaaaaaaaaaaaaaaaaaaaaaaaaaaaaaaaaaaaaaaaaaaaaaaaaaa

SEQ ID NO: 19831 - RNA, 3233 nt, synthetic construct
  source 1..3233: mol_type = other RNA
aggaaataagagagaaaagaagagtaagaagaaatataagagccaccatggcccctgctgccaagagagtgaagctggatagcagacaggagatcaagcggattaataaaattcggagaagactggtgaaggattctaacacaaagaaggctggcaagacaggccctatgaagacactgctggtgagagtgatgacacccgacctgagagaaagactggaaaacctgagaaagaagcctgagaatatcccccagcccatcagcaacacaagccgggccaacctgaataagctgctgaccgactacaccgaaatgaagaaggccatcctgcacgtgtattgggaagagttccagaaagacccagtcggcctgatgagcagagtggctcagcctgccagcaagaagatcgatcagaacaagctgaagcccgaaatggacgagaaggggaacctgacaaccgccggctttgcctgtagccagtgcggccagcccctgtttgtgtacaaactggaacaggtgagcgaaaagggcaaggcttacacgaattacttcggcagatgcaacgtggccgagcacgagaagctgatcctgctggcccagctgaagcctgagaaggatagcgatgaggcagtgacatattccctgggcaagttcggacagcgggccctggatttttattccattcatgtgaccaaggaatccacccaccccgtcaagcctcttgcccaaattgccggcaacagatacgccagcggccccgtgggcaaggccctgagcgacgcctgtatgggcaccatcgccagcttcctgtctaagtaccaggacattatcatcgagcaccagaaggtggtgaagggcaaccagaagagactggagagcctgcgcgagctggccggcaaggaaaacctggagtatcctagcgtgaccctgcctcctcagcctcatacaaaggagggcgtggatgcctacaacgaagtgatcgcccgggtgcggatgtgggtgaacctgaatctgtggcagaagctgaagctgtctagagacgacgccaagcccctgctgagactgaagggcttccccagcttccctctggtggagagacaggcaaatgaagtggactggtgggacatggtgtgtaacgtgaagaagctgatcaatgagaagaaggaggacggcaaagtgttctggcagaatctggccggctacaagcgtcaggaggccctgcggccctacctgagcagcgaggaagacagaaagaagggcaagaagttcgcccggtatcagctgggggacctgctgctgcacctcgagaagaagcacggcgaagactgggggaaggtgtacgatgaggcctgggagcggatcgataagaaggtggagggcctgagcaagcacatcaagctggaggaggaacggagatctgaggacgcccagagcaaggccgccctgaccgactggctgagagccaaggccagcttcgtcatcgaggggctgaaggaggccgacaaggacgagttctgccggtgcgaactgaagctgcagaagtggtacggagatctgagaggcaaacctttcgccatcgaggccgagaacagcatcctggacatcagcggcttcagcaagcagtacaactgcgcctttatttggcagaaggacggagtgaagaagctgaacctgtacctgatcatcaactatttcaagggcggcaagctgagattcaagaagatcaagcctgaagccttcgaggccaacagattctacaccgtgattaacaagaaaagcggagagatcgtgccaatggaagtgaacttcaacttcgacgaccctaacctgatcatcctgcccctggcatttggcaagcggcagggcagagagttcatctggaacgacctgctgtctctggagaccggcagcctgaagctggccaacggcagagtgatcgagaagacactgtacaacagacgaaccagacaagacgagcccgccctgtttgtggccctgaccttcgagagaagagaggtgctggacagcagcaatatcaagcctatgaacctgatcggcgtggaccggggcgagaacatccctgccgtgatcgcccttaccgaccccgagggatgccctctgagccggtttaaagacagcctgggcaaccctacccacatcctgagaattggcgagtcctacaaggagaagcagagaaccatccaggccaagaaggaggtggagcagcggcgggctggcggctactcccggaagtacgccagcaaggccaagaacctggccgacgacatggttagaaataccgccagagacctcctgtactacgctgtgacccaggacgccatgctgatcttcgagaacctgagcagaggcttcggcagacagggcaagagaaccttcatggccgagagacagtacacccggatggaggactggctgaccgccaagctggcctacgagggcctgccctctaagacctacctgtccaagaccttggcacagtacaccagcaagacatgctctaactgcggcttcacaatcacgagcgccgactacgaccgggtgctggagaaactgaagaagaccgccacaggctggatgaccaccattaacggcaaggagctgaaggtggagggccagatcacctactacaacaggtacaaacggcagaacgtggtgaaggacctgagcgtggaactggatagactgagcgaggaaagcgtaaacaatgacatcagcagctggaccaagggccggagcggcgaggccctgagcctgctgaagaagagattctcccacagaccagtgcaggagaagttcgtgtgtctgaactgcggcttcgagacccacgccgacgagcaagccgccctgaacatcgcccggtcttggcttttcctgcggagccaggagtacaagaagtaccagacaaacaagaccacaggcaacacagacaagagagccttcgtcgagacctggcagagcttctacagaaagaagctgaaggaggtgtggaagcctgccgtgggaagccccgctgccaagagagtgaagctggactaagctgccttctgcggggcttgccttctggccatgcccttcttctctcccttgcacctgtacctcttggtctttgaataaagcctgagtaggaagtctagaaaaaaaaaaaaaaaaaaaaaaaaaaaaaaaaaaaaaaaaaaaaaaaaaaaaaaaaaaaaaaaaaaaaaaaaaaaaaaa

SEQ ID NO: 19832 - RNA, 3236 nt, synthetic construct
  source 1..3236: mol_type = other RNA
aggaaataagagagaaaagaagagtaagaagaaatataagagccaccatggcccctgctgccaagagagtgaagctggatagcagacaggagatcaagcggattaataaaattcggagaagactggtgaaggattctaacacaaagaaggctggcaagacacggggccctatgaagacactgctggtgagagtgatgacacccgacctgagagaaagactggaaaacctgagaaagaagcctgagaatatcccccagcccatcagcaacacaagccgggccaacctgaataagctgctgaccgactacaccgaaatgaagaaggccatcctgcacgtgtattgggaagagttccagaaagacccagtcggcctgatgagcagagtggctcagcctgccagcaagaagatcgatcagaacaagctgaagcccgaaatggacgagaaggggaacctgacaaccgccggctttgcctgtagccagtgcggccagcccctgtttgtgtacaaactggaacaggtgagcgaaaagggcaaggcttacacgaattacttcggcagatgcaacgtggccgagcacgagaagctgatcaagctggcccagctgaagcctgagaaggatagcgatgaggcagtgacatattccctgggcaagttcggacagcgggccctggatttttattccattcatgtgaccaaggaatccacccaccccgtcaagcctcttgcccaaattgccggcaacagatacgcctccagccccgtgggcaaggccctgagcgacgcctgtatgggcaccatcgccagcttcctgtctaagtaccaggacattatcatcgagcaccagaaggtggtgaagggcaaccagaagagactggagagcctgcgcgagctggccggcaaggaaaacctggagtatcctagcgtgaccctgcctcctcagcctcatacaaaggagggcgtggatgcctacaacgaagtgatcgcccgggtgcggatgtgggtgaacctgaatctgtggcagaagctgaagctgtctagagacgacgccaagcccctgctgagactgaagggcttccccagcttccctctggtggagagacaggcaaatgaagtggactggtgggacatggtgtgtaacgtgaagaagctgatcaatgagaagaaggaggacggcaaagtgttctggcagaatctggccggctacaagcgtcaggaggccctgcggccctacctgagcagcgaggaagacagaaagaagggcaagaagttcgcccggtatcagctgggggacctgctgctgcacctcgagaagaagcacggcgaagactgggggaaggtgtacgatgaggcctgggagcggatcgataagaaggtggagggcctgagcaagcacatcaagctggaggaggaacggagatctgaggacgcccagagcaaggccgccctgaccgactggctgagagccaaggccagcttcgtcatcgaggggctgaaggaggccgacaaggacgagttctgccggtgcgaactgaagctgcagaagtggtacggagatctgagaggcaaacctttcgccatcgaggccgagaacagcatcctggacatcagcggcttcagcaagcagtacaactgcgcctttatttggcagaaggacggagtgaagaagctgaacctgtacctgatcatcaactatttcaagggcggcaagctgagattcaagaagatcaagcctgaagccttcgaggccaacagattctacaccgtgattaacaagaaaagcggagagatcgtgccaatggaagtgaacttcaacttcgacgaccctaacctgatcatcctgcccctggcatttggcaagcggcagggcagagagttcatctggaacgacctgctgtctctggagaccggcagcctgaagctggccaacggcagagtgatcgagaagacactgtacaacagacgaaccagacaagacgagcccgccctgtttgtggccctgaccttcgagagaagagaggtgctggacagcagcaatatcaagcctatgaacctgatcggcgtggaccggggcgagaacatccctgccgtgatcgcccttaccgaccccgagggatgccctctgagccggtttaaagacagcctgggcaaccctacccacatcctgagaattggcgagtcctacaaggagaagcagagaaccatccaggccaagaaggaggtggagcagcggcgggctggcggctactcccggaagtacgccagcaaggccaagaacctggccgacgacatggttagaaataccgccagagacctcctgtactacgctgtgacccaggacgccatgctgatcttcgagaacctgagcagaggcttcggcagacagggcaagagaaccttcatggccgagagacagtacacccggatggaggactggctgaccgccaagctggcctacgagggcctgccctctaagacctacctgtccaagaccttggcacagtacaccagcaagacatgctctaactgcggcttcacaatcacgagcgccgactacgaccgggtgctggagaaactgaagaagaccgccacaggctggatgaccaccattaacggcaaggagctgaaggtggagggccagatcacctactacaacaggtacaaacggcagaacgtggtgaaggacctgagcgtggaactggatagactgagcgaggaaagcgtaaacaatgacatcagcagctggaccaagggccggagcggcgaggccctgagcctgctgaagaagagattctcccacagaccagtgcaggagaagttcgtgtgtctgaactgcggcttcgagacccacgccgacgagcaagccgccctgaacatcgcccggtcttggcttttcctgcggagccaggagtacaagaagtaccagacaaacaagaccacaggcaacacagacaagagagccttcgtcgagacctggcagagcttctacagaaagaagctgaaggaggtgtggaagcctgccgtgggaagccccgctgccaagagagtgaagctggactaagctgccttctgcggggcttgccttctggccatgcccttcttctctcccttgcacctgtacctcttggtctttgaataaagcctgagtaggaagtctagaaaaaaaaaaaaaaaaaaaaaaaaaaaaaaaaaaaaaaaaaaaaaaaaaaaaaaaaaaaaaaaaaaaaaaaaaaaaaaa

SEQ ID NO: 19833 - RNA, 3233 nt, synthetic construct
  source 1..3233: mol_type = other RNA
aggaaataagagagaaaagaagagtaagaagaaatataagagccaccatggcccctgctgccaagagagtgaagctggatagcagacaggagatcaagcggattaataaaattcggagaagactggtgaaggattctaacacaaagaaggctggcaagacaggccctatgaagacactgctggtgagagtgatgacacccgacctgagagaaagactggaaaacctgagaaagaagcctgagaatatcccccagcccatcagcaacacaagccgggccaacctgaataagctgctgaccgactacaccgaaatgaagaaggccatcctgcacgtgtattgggaagagttccagaaagacccagtcggcctgatgagcagagtggctcagcctgccagcaagaagatcgatcagaacaagctgaagcccgaaatggacgagaaggggaacctgacaaccgccggctttgcctgtagccagtgcggccagcccctgtttgtgtacaaactggaacaggtgagcgaaaagggcaaggcttacacgaattacttcggcagatgcaacgtggccgagcacgagaagctgatcctgctggcccagctgaagcctgagaaggatagcgatgaggcagtgacatattccctgggcaagttcggacagcgggccctggatttttattccattcatgtgaccaaggaatccacccaccccgtcaagcctcttgcccaaattgccggcaacagatacgccagcggccccgtgggcaaggccctgagcgacgcctgtatgggcaccatcgccagcttcctgtctaagtaccaggacattatcatcgagcaccagaaggtggtgaagggcaaccagaagagactggagagcctgcgcgagctggccggcaaggaaaacctggagtatcctagcgtgaccctgcctcctcagcctcatacaaaggagggcgtggatgcctacaacgaagtgatcgcccgggtgcggatgtgggtgaacctgaatctgtggcagaagctgaagctgtctagagacgacgccaagcccctgctgagactgaagaagttccccagcttccctctggtggagagacaggcaaatgaagtggactggtgggacatggtgtgtaacgtgaagaagctgatcaatgagaagaaggaggacggcaaagtgttctggcagaatctggccggctacaagcgtcaggaggccctgcggccctacctgagcagcgaggaagacagaaagaagggcaagaagttcgcccggtatcagctgggggacctgctgctgcacctcgagaagaagcacggcgaagactgggggaaggtgtacgatgaggcctgggagcggatcgataagaaggtggagggcctgagcaagcacatcaagctggaggaggaacggagatctgaggacgcccagagcaaggccgccctgaccgactggctgagagccaaggccagcttcgtcatcgaggggctgaaggaggccgacaaggacgagttctgccggtgcgaactgaagctgcagaagtggtacggagatctgagaggcaaacctttcgccatcgaggccgagaacagcatcctggacatcagcggcttcagcaagcagtacaactgcgcctttatttggcagaaggacggagtgaagaagctgaacctgtacctgatcatcaactatttcaagggcggcaagctgagattcaagaagatcaagcctgaagccttcgaggccaacagattctacaccgtgattaacaagaaaagcggagagatcgtgccaatggaagtgaacttcaacttcgacgaccctaacctgatcatcctgcccctggcatttggcaagcggcagggcagagagttcatctggaacgacctgctgtctctggagaccggcagcctgaagctggccaacggcagagtgatcgagaagacactgtacaacagacgaaccagacaagacgagcccgccctgtttgtggccctgaccttcgagagaagagaggtgctggacagcagcaatatcaagcctatgaacctgatcggcgtggaccggggcgagaacatccctgccgtgatcgcccttaccgaccccgagggatgccctctgagccggtttaaagacagcctgggcaaccctacccacatcctgagaattggcgagtcctacaaggagaagcagagaaccatccaggccaagaaggaggtggagcagcggcgggctggcggctactcccggaagtacgccagcaaggccaagaacctggccgacgacatggttagaaataccgccagagacctcctgtactacgctgtgacccaggacgccatgctgatcttcgagaacctgagcagaggcttcggcagacagggcaagagaaccttcatggccgagagacagtacacccggatggaggactggctgaccgccaagctggcctacgagggcctgccctctaagacctacctgtccaagaccttggcacagtacaccagcaagacatgctctaactgcggcttcacaatcacgagcgccgactacgaccgggtgctggagaaactgaagaagaccgccacaggctggatgaccaccattaacggcaaggagctgaaggtggagggccagatcacctactacaacaggtacaaacggcagaacgtggtgaaggacctgagcgtggaactggatagactgagcgaggaaagcgtaaacaatgacatcagcagctggaccaagggccggagcggcgaggccctgagcctgctgaagaagagattctcccacagaccagtgcaggagaagttcgtgtgtctgaactgcggcttcgagacccacgccgacgagcaagccgccctgaacatcgcccggtcttggcttttcctgcggagccaggagtacaagaagtaccagacaaacaagaccacaggcaacacagacaagagagccttcgtcgagacctggcagagcttctacagaaagaagctgaaggaggtgtggaagcctgccgtgggaagccccgctgccaagagagtgaagctggactaagctgccttctgcggggcttgccttctggccatgcccttcttctctcccttgcacctgtacctcttggtctttgaataaagcctgagtaggaagtctagaaaaaaaaaaaaaaaaaaaaaaaaaaaaaaaaaaaaaaaaaaaaaaaaaaaaaaaaaaaaaaaaaaaaaaaaaaaaaaa

SEQ ID NO: 19834 - RNA, 3230 nt, synthetic construct; identical to SEQ ID NO: 19830
  source 1..3230: mol_type = other RNA
  modified_base 1..3230: mod_base = OTHER; note = each t is m1f

SEQ ID NO: 19835 - RNA, 3233 nt, synthetic construct; identical to SEQ ID NO: 19831
  source 1..3233: mol_type = other RNA
  modified_base 1..3233: mod_base = OTHER; note = each t is m1f

SEQ ID NO: 19836 - RNA, 3236 nt, synthetic construct; identical to SEQ ID NO: 19832
  source 1..3236: mol_type = other RNA
  modified_base 1..3236: mod_base = OTHER; note = each t is m1f

SEQ ID NO: 19837 - RNA, 3233 nt, synthetic construct; identical to SEQ ID NO: 19833
  source 1..3233: mol_type = other RNA
  modified_base 1..3233: mod_base = OTHER; note = each t is m1f

SEQ ID NO: 19838 - DNA, 3230 bp, synthetic construct
  source 1..3230: mol_type = other DNA
aggaaataagagagaaaagaagagtaagaagaaatataagagccaccatggcccctgctgccaagagagtgaagctggatagcagacaggagatcaagcggattaataaaattcggagaagactggtgaaggattctaacacaaagaaggctggcaagacaggccctatgaagacactgctggtgagagtgatgacacccgacctgagagaaagactggaaaacctgagaaagaagcctgagaatatcccccagcccatcagcaacacaagccgggccaacctgaataagctgctgaccgactacaccgaaatgaagaaggccatcctgcacgtgtattgggaagagttccagaaagacccagtcggcctgatgagcagagtggctcagcctgccagcaagaagatcgatcagaacaagctgaagcccgaaatggacgagaaggggaacctgacaaccgccggctttgcctgtagccagtgcggccagcccctgtttgtgtacaaactggaacaggtgagcgaaaagggcaaggcttacacgaattacttcggcagatgcaacgtggccgagcacgagaagctgatcctgctggcccagctgaagcctgagaaggatagcgatgaggcagtgacatattccctgggcaagttcggacagcgggccctggatttttattccattcatgtgaccaaggaatccacccaccccgtcaagcctcttgcccaaattgccggcaacagatacgccagcggccccgtgggcaaggccctgagcgacgcctgtatgggcaccatcgccagcttcctgtctaagtaccaggacattatcatcgagcaccagaaggtggtgaagggcaaccagaagagactggagagcctgcgcgagctggccggcaaggaaaacctggagtatcctagcgtgaccctgcctcctcagcctcatacaaaggagggcgtggatgcctacaacgaagtgatcgcccgggtgcggatgtgggtgaacctgaatctgtggcagaagctgaagctgtctagagacgacgccaagcccctgctgagactgaagggcttccccagcttccctctggtggagagacaggcaaatgaagtggactggtgggacatggtgtgtaacgtgaagaagctgatcaatgagaagaaggaggacggcaaagtgttctggcagaatctggccggctacaagcgtcaggaggccctgcggccctacctgagcagcgaggaagacagaaagaagggcaagaagttcgcccggtatcagctgggggacctgctgctgcacctcgagaagaagcacggcgaagactgggggaaggtgtacgatgaggcctgggagcggatcgataagaaggtggagggcctgagcaagcacatcaagctggaggaggaacggagatctgaggacgcccagagcaaggccgccctgaccgactggctgagagccaaggccagcttcgtcatcgaggggctgaaggaggccgacaaggacgagttctgccggtgcgaactgaagctgcagaagtggtacggagatctgagaggcaaacctttcgccatcgaggccgagaacagcatcctggacatcagcggcttcagcaagcagtacaactgcgcctttatttggcagaaggacggagtgaagaagctgaacctgtacctgatcatcaactatttcaagggcggcaagctgagattcaagaagatcaagcctgaagccttcgaggccaacagattctacaccgtgattaacaagaaaagcggagagatcgtgccaatggaagtgaacttcaacttcgacgaccctaacctgatcatcctgcccctggcatttggcaagcggcagggcagagagttcatctggaacgacctgctgtctctggagaccggcagcctgaagctggccaacggcagagtgatcgagaagacactgtacaacagacgaaccagacaagacgagcccgccctgtttgtggccctgaccttcgagagaagagaggtgctggacagcagcaatatcaagcctatgaacctgatcggcgtggaccggggcgagaacatccctgccgtgatcgcccttaccgaccccgagggatgccctctgagccggtttaaagacagcctgggcaaccctacccacatcctgagaattggcgagtcctacaaggagaagcagagaaccatccaggccaagaaggaggtggagcagcggcgggctggcggctactcccggaagtacgccagcaaggccaagaacctggccgacgacatggttagaaataccgccagagacctcctgtactacgctgtgacccaggacgccatgctgatcttcgagaacctgagcagaggcttcggcagacagggcaagagaaccttcatggccgagagacagtacacccggatggaggactggctgaccgccaagctggcctacgagggcctgtctaagacctacctgtccaagaccttggcacagtacaccagcaagacatgctctaactgcggcttcacaatcacgagcgccgactacgaccgggtgctggagaaactgaagaagaccgccacaggctggatgaccaccattaacggcaaggagctgaaggtggagggccagatcacctactacaacaggtacaaacggcagaacgtggtgaaggacctgagcgtggaactggatagactgagcgaggaaagcgtaaacaatgacatcagcagctggaccaagggccggagcggcgaggccctgagcctgctgaagaagagattctcccacagaccagtgcaggagaagttcgtgtgtctgaactgcggcttcgagacccacgccgacgagcaagccgccctgaacatcgcccggtcttggcttttcctgcggagccaggagtacaagaagtaccagacaaacaagaccacaggcaacacagacaagagagccttcgtcgagacctggcagagcttctacagaaagaagctgaaggaggtgtggaagcctgccgtgggaagccccgctgccaagagagtgaagctggactaagctgccttctgcggggcttgccttctggccatgcccttcttctctcccttgcacctgtacctcttggtctttgaataaagcctgagtaggaagtctagaaaaaaaaaaaaaaaaaaaaaaaaaaaaaaaaaaaaaaaaaaaaaaaaaaaaaaaaaaaaaaaaaaaaaaaaaaaaaaa

SEQ ID NO: 19839 - DNA, 3233 bp, synthetic construct
  source 1..3233: mol_type = other DNA
aggaaataagagagaaaagaagagtaagaagaaatataagagccaccatggcccctgctgccaagagagtgaagctggatagcagacaggagatcaagcggattaataaaattcggagaagactggtgaaggattctaacacaaagaaggctggcaagacaggccctatgaagacactgctggtgagagtgatgacacccgacctgagagaaagactggaaaacctgagaaagaagcctgagaatatcccccagcccatcagcaacacaagccgggccaacctgaataagctgctgaccgactacaccgaaatgaagaaggccatcctgcacgtgtattgggaagagttccagaaagacccagtcggcctgatgagcagagtggctcagcctgccagcaagaagatcgatcagaacaagctgaagcccgaaatggacgagaaggggaacctgacaaccgccggctttgcctgtagccagtgcggccagcccctgtttgtgtacaaactggaacaggtgagcgaaaagggcaaggcttacacgaattacttcggcagatgcaacgtggccgagcacgagaagctgatcctgctggcccagctgaagcctgagaaggatagcgatgaggcagtgacatattccctgggcaagttcggacagcgggccctggatttttattccattcatgtgaccaaggaatccacccaccccgtcaagcctcttgcccaaattgccggcaacagatacgccagcggccccgtgggcaaggccctgagcgacgcctgtatgggcaccatcgccagcttcctgtctaagtaccaggacattatcatcgagcaccagaaggtggtgaagggcaaccagaagagactggagagcctgcgcgagctggccggcaaggaaaacctggagtatcctagcgtgaccctgcctcctcagcctcatacaaaggagggcgtggatgcctacaacgaagtgatcgcccgggtgcggatgtgggtgaacctgaatctgtggcagaagctgaagctgtctagagacgacgccaagcccctgctgagactgaagggcttccccagcttccctctggtggagagacaggcaaatgaagtggactggtgggacatggtgtgtaacgtgaagaagctgatcaatgagaagaaggaggacggcaaagtgttctggcagaatctggccggctacaagcgtcaggaggccctgcggccctacctgagcagcgaggaagacagaaagaagggcaagaagttcgcccggtatcagctgggggacctgctgctgcacctcgagaagaagcacggcgaagactgggggaaggtgtacgatgaggcctgggagcggatcgataagaaggtggagggcctgagcaagcacatcaagctggaggaggaacggagatctgaggacgcccagagcaaggccgccctgaccgactggctgagagccaaggccagcttcgtcatcgaggggctgaaggaggccgacaaggacgagttctgccggtgcgaactgaagctgcagaagtggtacggagatctgagaggcaaacctttcgccatcgaggccgagaacagcatcctggacatcagcggcttcagcaagcagtacaactgcgcctttatttggcagaaggacggagtgaagaagctgaacctgtacctgatcatcaactatttcaagggcggcaagctgagattcaagaagatcaagcctgaagccttcgaggccaacagattctacaccgtgattaacaagaaaagcggagagatcgtgccaatggaagtgaacttcaacttcgacgaccctaacctgatcatcctgcccctggcatttggcaagcggcagggcagagagttcatctggaacgacctgctgtctctggagaccggcagcctgaagctggccaacggcagagtgatcgagaagacactgtacaacagacgaaccagacaagacgagcccgccctgtttgtggccctgaccttcgagagaagagaggtgctggacagcagcaatatcaagcctatgaacctgatcggcgtggaccggggcgagaacatccctgccgtgatcgcccttaccgaccccgagggatgccctctgagccggtttaaagacagcctgggcaaccctacccacatcctgagaattggcgagtcctacaaggagaagcagagaaccatccaggccaagaaggaggtggagcagcggcgggctggcggctactcccggaagtacgccagcaaggccaagaacctggccgacgacatggttagaaataccgccagagacctcctgtactacgctgtgacccaggacgccatgctgatcttcgagaacctgagcagaggcttcggcagacagggcaagagaaccttcatggccgagagacagtacacccggatggaggactggctgaccgccaagctggcctacgagggcctgccctctaagacctacctgtccaagaccttggcacagtacaccagcaagacatgctctaactgcggcttcacaatcacgagcgccgactacgaccgggtgctggagaaactgaagaagaccgccacaggctggatgaccaccattaacggcaaggagctgaaggtggagggccagatcacctactacaacaggtacaaacggcagaacgtggtgaaggacctgagcgtggaactggatagactgagcgaggaaagcgtaaacaatgacatcagcagctggaccaagggccggagcggcgaggccctgagcctgctgaagaagagattctcccacagaccagtgcaggagaagttcgtgtgtctgaactgcggcttcgagacccacgccgacgagcaagccgccctgaacatcgcccggtcttggcttttcctgcggagccaggagtacaagaagtaccagacaaacaagaccacaggcaacacagacaagagagccttcgtcgagacctggcagagcttctacagaaagaagctgaaggaggtgtggaagcctgccgtgggaagccccgctgccaagagagtgaagctggactaagctgccttctgcggggcttgccttctggccatgcccttcttctctcccttgcacctgtacctcttggtctttgaataaagcctgagtaggaagtctagaaaaaaaaaaaaaaaaaaaaaaaaaaaaaaaaaaaaaaaaaaaaaaaaaaaaaaaaaaaaaaaaaaaaaaaaaaaaaaa

SEQ ID NO: 19840 - DNA, 3236 bp, synthetic construct
  source 1..3236: mol_type = other DNA
aggaaataagagagaaaagaagagtaagaagaaatataagagccaccatggcccctgctgccaagagagtgaagctggatagcagacaggagatcaagcggattaataaaattcggagaagactggtgaaggattctaacacaaagaaggctggcaagacacggggccctatgaagacactgctggtgagagtgatgacacccgacctgagagaaagactggaaaacctgagaaagaagcctgagaatatcccccagcccatcagcaacacaagccgggccaacctgaataagctgctgaccgactacaccgaaatgaagaaggccatcctgcacgtgtattgggaagagttccagaaagacccagtcggcctgatgagcagagtggctcagcctgccagcaagaagatcgatcagaacaagctgaagcccgaaatggacgagaaggggaacctgacaaccgccggctttgcctgtagccagtgcggccagcccctgtttgtgtacaaactggaacaggtgagcgaaaagggcaaggcttacacgaattacttcggcagatgcaacgtggccgagcacgagaagctgatcaagctggcccagctgaagcctgagaaggatagcgatgaggcagtgacatattccctgggcaagttcggacagcgggccctggatttttattccattcatgtgaccaaggaatccacccaccccgtcaagcctcttgcccaaattgccggcaacagatacgcctccagccccgtgggcaaggccctgagcgacgcctgtatgggcaccatcgccagcttcctgtctaagtaccaggacattatcatcgagcaccagaaggtggtgaagggcaaccagaagagactggagagcctgcgcgagctggccggcaaggaaaacctggagtatcctagcgtgaccctgcctcctcagcctcatacaaaggagggcgtggatgcctacaacgaagtgatcgcccgggtgcggatgtgggtgaacctgaatctgtggcagaagctgaagctgtctagagacgacgccaagcccctgctgagactgaagggcttccccagcttccctctggtggagagacaggcaaatgaagtggactggtgggacatggtgtgtaacgtgaagaagctgatcaatgagaagaaggaggacggcaaagtgttctggcagaatctggccggctacaagcgtcaggaggccctgcggccctacctgagcagcgaggaagacagaaagaagggcaagaagttcgcccggtatcagctgggggacctgctgctgcacctcgagaagaagcacggcgaagactgggggaaggtgtacgatgaggcctgggagcggatcgataagaaggtggagggcctgagcaagcacatcaagctggaggaggaacggagatctgaggacgcccagagcaaggccgccctgaccgactggctgagagccaaggccagcttcgtcatcgaggggctgaaggaggccgacaaggacgagttctgccggtgcgaactgaagctgcagaagtggtacggagatctgagaggcaaacctttcgccatcgaggccgagaacagcatcctggacatcagcggcttcagcaagcagtacaactgcgcctttatttggcagaaggacggagtgaagaagctgaacctgtacctgatcatcaactatttcaagggcggcaagctgagattcaagaagatcaagcctgaagccttcgaggccaacagattctacaccgtgattaacaagaaaagcggagagatcgtgccaatggaagtgaacttcaacttcgacgaccctaacctgatcatcctgcccctggcatttggcaagcggcagggcagagagttcatctggaacgacctgctgtctctggagaccggcagcctgaagctggccaacggcagagtgatcgagaagacactgtacaacagacgaaccagacaagacgagcccgccctgtttgtggccctgaccttcgagagaagagaggtgctggacagcagcaatatcaagcctatgaacctgatcggcgtggaccggggcgagaacatccctgccgtgatcgcccttaccgaccccgagggatgccctctgagccggtttaaagacagcctgggcaaccctacccacatcctgagaattggcgagtcctacaaggagaagcagagaaccatccaggccaagaaggaggtggagcagcggcgggctggcggctactcccggaagtacgccagcaaggccaagaacctggccgacgacatggttagaaataccgccagagacctcctgtactacgctgtgacccaggacgccatgctgatcttcgagaacctgagcagaggcttcggcagacagggcaagagaaccttcatggccgagagacagtacacccggatggaggactggctgaccgccaagctggcctacgagggcctgccctctaagacctacctgtccaagaccttggcacagtacaccagcaagacatgctctaactgcggcttcacaatcacgagcgccgactacgaccgggtgctggagaaactgaagaagaccgccacaggctggatgaccaccattaacggcaaggagctgaaggtggagggccagatcacctactacaacaggtacaaacggcagaacgtggtgaaggacctgagcgtggaactggatagactgagcgaggaaagcgtaaacaatgacatcagcagctggaccaagggccggagcggcgaggccctgagcctgctgaagaagagattctcccacagaccagtgcaggagaagttcgtgtgtctgaactgcggcttcgagacccacgccgacgagcaagccgccctgaacatcgcccggtcttggcttttcctgcggagccaggagtacaagaagtaccagacaaacaagaccacaggcaacacagacaagagagccttcgtcgagacctggcagagcttctacagaaagaagctgaaggaggtgtggaagcctgccgtgggaagccccgctgccaagagagtgaagctggactaagctgccttctgcggggcttgccttctggccatgcccttcttctctcccttgcacctgtacctcttggtctttgaataaagcctgagtaggaagtctagaaaaaaaaaaaaaaaaaaaaaaaaaaaaaaaaaaaaaaaaaaaaaaaaaaaaaaaaaaaaaaaaaaaaaaaaaaaaaaa

SEQ ID NO: 19841 - DNA, 3233 bp, synthetic construct
  source 1..3233: mol_type = other DNA
aggaaataagagagaaaagaagagtaagaagaaatataagagccaccatggcccctgctgccaagagagtgaagctggatagcagacaggagatcaagcggattaataaaattcggagaagactggtgaaggattctaacacaaagaaggctggcaagacaggccctatgaagacactgctggtgagagtgatgacacccgacctgagagaaagactggaaaacctgagaaagaagcctgagaatatcccccagcccatcagcaacacaagccgggccaacctgaataagctgctgaccgactacaccgaaatgaagaaggccatcctgcacgtgtattgggaagagttccagaaagacccagtcggcctgatgagcagagtggctcagcctgccagcaagaagatcgatcagaacaagctgaagcccgaaatggacgagaaggggaacctgacaaccgccggctttgcctgtagccagtgcggccagcccctgtttgtgtacaaactggaacaggtgagcgaaaagggcaaggcttacacgaattacttcggcagatgcaacgtggccgagcacgagaagctgatcctgctggcccagctgaagcctgagaaggatagcgatgaggcagtgacatattccctgggcaagttcggacagcgggccctggatttttattccattcatgtgaccaaggaatccacccaccccgtcaagcctcttgcccaaattgccggcaacagatacgccagcggccccgtgggcaaggccctgagcgacgcctgtatgggcaccatcgccagcttcctgtctaagtaccaggacattatcatcgagcaccagaaggtggtgaagggcaaccagaagagactggagagcctgcgcgagctggccggcaaggaaaacctggagtatcctagcgtgaccctgcctcctcagcctcatacaaaggagggcgtggatgcctacaacgaagtgatcgcccgggtgcggatgtgggtgaacctgaatctgtggcagaagctgaagctgtctagagacgacgccaagcccctgctgagactgaagaagttccccagcttccctctggtggagagacaggcaaatgaagtggactggtgggacatggtgtgtaacgtgaagaagctgatcaatgagaagaaggaggacggcaaagtgttctggcagaatctggccggctacaagcgtcaggaggccctgcggccctacctgagcagcgaggaagacagaaagaagggcaagaagttcgcccggtatcagctgggggacctgctgctgcacctcgagaagaagcacggcgaagactgggggaaggtgtacgatgaggcctgggagcggatcgataagaaggtggagggcctgagcaagcacatcaagctggaggaggaacggagatctgaggacgcccagagcaaggccgccctgaccgactggctgagagccaaggccagcttcgtcatcgaggggctgaaggaggccgacaaggacgagttctgccggtgcgaactgaagctgcagaagtggtacggagatctgagaggcaaacctttcgccatcgaggccgagaacagcatcctggacatcagcggcttcagcaagcagtacaactgcgcctttatttggcagaaggacggagtgaagaagctgaacctgtacctgatcatcaactatttcaagggcggcaagctgagattcaagaagatcaagcctgaagccttcgaggccaacagattctacaccgtgattaacaagaaaagcggagagatcgtgccaatggaagtgaacttcaacttcgacgaccctaacctgatcatcctgcccctggcatttggcaagcggcagggcagagagttcatctggaacgacctgctgtctctggagaccggcagcctgaagctggccaacggcagagtgatcgagaagacactgtacaacagacgaaccagacaagacgagcccgccctgtttgtggccctgaccttcgagagaagagaggtgctggacagcagcaatatcaagcctatgaacctgatcggcgtggaccggggcgagaacatccctgccgtgatcgcccttaccgaccccgagggatgccctctgagccggtttaaagacagcctgggcaaccctacccacatcctgagaattggcgagtcctacaaggagaagcagagaaccatccaggccaagaaggaggtggagcagcggcgggctggcggctactcccggaagtacgccagcaaggccaagaacctggccgacgacatggttagaaataccgccagagacctcctgtactacgctgtgacccaggacgccatgctgatcttcgagaacctgagcagaggcttcggcagacagggcaagagaaccttcatggccgagagacagtacacccggatggaggactggctgaccgccaagctggcctacgagggcctgccctctaagacctacctgtccaagaccttggcacagtacaccagcaagacatgctctaactgcggcttcacaatcacgagcgccgactacgaccgggtgctggagaaactgaagaagaccgccacaggctggatgaccaccattaacggcaaggagctgaaggtggagggccagatcacctactacaacaggtacaaacggcagaacgtggtgaaggacctgagcgtggaactggatagactgagcgaggaaagcgtaaacaatgacatcagcagctggaccaagggccggagcggcgaggccctgagcctgctgaagaagagattctcccacagaccagtgcaggagaagttcgtgtgtctgaactgcggcttcgagacccacgccgacgagcaagccgccctgaacatcgcccggtcttggcttttcctgcggagccaggagtacaagaagtaccagacaaacaagaccacaggcaacacagacaagagagccttcgtcgagacctggcagagcttctacagaaagaagctgaaggaggtgtggaagcctgccgtgggaagccccgctgccaagagagtgaagctggactaagctgccttctgcggggcttgccttctggccatgcccttcttctctcccttgcacctgtacctcttggtctttgaataaagcctgagtaggaagtctagaaaaaaaaaaaaaaaaaaaaaaaaaaaaaaaaaaaaaaaaaaaaaaaaaaaaaaaaaaaaaaaaaaaaaaaaaaaaaaa

SEQ ID NO: 19842 - RNA, 3151 nt, synthetic construct
  source 1..3151: mol_type = other RNA
aggaaataagagagaaaagaagagtaagaagaaatataagagccaccatggcccctgctgccaagagagtgaagctggatagcagacaggagatcaagcggattaataaaattcggagaagactggtgaaggattctaacacaaagaaggctggcaagacaggccctatgaagacactgctggtgagagtgatgacacccgacctgagagaaagactggaaaacctgagaaagaagcctgagaatatcccccagcccatcagcaacacaagccgggccaacctgaataagctgctgaccgactacaccgaaatgaagaaggccatcctgcacgtgtattgggaagagttccagaaagacccagtcggcctgatgagcagagtggctcagcctgccagcaagaagatcgatcagaacaagctgaagcccgaaatggacgagaaggggaacctgacaaccgccggctttgcctgtagccagtgcggccagcccctgtttgtgtacaaactggaacaggtgagcgaaaagggcaaggcttacacgaattacttcggcagatgcaacgtggccgagcacgagaagctgatcctgctggcccagctgaagcctgagaaggatagcgatgaggcagtgacatattccctgggcaagttcggacagcgggccctggatttttattccattcatgtgaccaaggaatccacccaccccgtcaagcctcttgcccaaattgccggcaacagatacgccagcggccccgtgggcaaggccctgagcgacgcctgtatgggcaccatcgccagcttcctgtctaagtaccaggacattatcatcgagcaccagaaggtggtgaagggcaaccagaagagactggagagcctgcgcgagctggccggcaaggaaaacctggagtatcctagcgtgaccctgcctcctcagcctcatacaaaggagggcgtggatgcctacaacgaagtgatcgcccgggtgcggatgtgggtgaacctgaatctgtggcagaagctgaagctgtctagagacgacgccaagcccctgctgagactgaagggcttccccagcttccctctggtggagagacaggcaaatgaagtggactggtgggacatggtgtgtaacgtgaagaagctgatcaatgagaagaaggaggacggcaaagtgttctggcagaatctggccggctacaagcgtcaggaggccctgcggccctacctgagcagcgaggaagacagaaagaagggcaagaagttcgcccggtatcagctgggggacctgctgctgcacctcgagaagaagcacggcgaagactgggggaaggtgtacgatgaggcctgggagcggatcgataagaaggtggagggcctgagcaagcacatcaagctggaggaggaacggagatctgaggacgcccagagcaaggccgccctgaccgactggctgagagccaaggccagcttcgtcatcgaggggctgaaggaggccgacaaggacgagttctgccggtgcgaactgaagctgcagaagtggtacggagatctgagaggcaaacctttcgccatcgaggccgagaacagcatcctggacatcagcggcttcagcaagcagtacaactgcgcctttatttggcagaaggacggagtgaagaagctgaacctgtacctgatcatcaactatttcaagggcggcaagctgagattcaagaagatcaagcctgaagccttcgaggccaacagattctacaccgtgattaacaagaaaagcggagagatcgtgccaatggaagtgaacttcaacttcgacgaccctaacctgatcatcctgcccctggcatttggcaagcggcagggcagagagttcatctggaacgacctgctgtctctggagaccggcagcctgaagctggccaacggcagagtgatcgagaagacactgtacaacagacgaaccagacaagacgagcccgccctgtttgtggccctgaccttcgagagaagagaggtgctggacagcagcaatatcaagcctatgaacctgatcggcgtggaccggggcgagaacatccctgccgtgatcgcccttaccgaccccgagggatgccctctgagccggtttaaagacagcctgggcaaccctacccacatcctgagaattggcgagtcctacaaggagaagcagagaaccatccaggccaagaaggaggtggagcagcggcgggctggcggctactcccggaagtacgccagcaaggccaagaacctggccgacgacatggttagaaataccgccagagacctcctgtactacgctgtgacccaggacgccatgctgatcttcgagaacctgagcagaggcttcggcagacagggcaagagaaccttcatggccgagagacagtacacccggatggaggactggctgaccgccaagctggcctacgagggcctgtctaagacctacctgtccaagaccttggcacagtacaccagcaagacatgctctaactgcggcttcacaatcacgagcgccgactacgaccgggtgctggagaaactgaagaagaccgccacaggctggatgaccaccattaacggcaaggagctgaaggtggagggccagatcacctactacaacaggtacaaacggcagaacgtggtgaaggacctgagcgtggaactggatagactgagcgaggaaagcgtaaacaatgacatcagcagctggaccaagggccggagcggcgaggccctgagcctgctgaagaagagattctcccacagaccagtgcaggagaagttcgtgtgtctgaactgcggcttcgagacccacgccgacgagcaagccgccctgaacatcgcccggtcttggcttttcctgcggagccaggagtacaagaagtaccagacaaacaagaccacaggcaacacagacaagagagccttcgtcgagacctggcagagcttctacagaaagaagctgaaggaggtgtggaagcctgccgtgggaagccccgctgccaagagagtgaagctggactaagctgccttctgcggggcttgccttctggccatgcccttcttctctcccttgcacctgtacctcttggtctttgaataaagcctgagtaggaagtctag

SEQ ID NO: 19843 - RNA, 3154 nt, synthetic construct
  source 1..3154: mol_type = other RNA
aggaaataagagagaaaagaagagtaagaagaaatataagagccaccatggcccctgctgccaagagagtgaagctggatagcagacaggagatcaagcggattaataaaattcggagaagactggtgaaggattctaacacaaagaaggctggcaagacaggccctatgaagacactgctggtgagagtgatgacacccgacctgagagaaagactggaaaacctgagaaagaagcctgagaatatcccccagcccatcagcaacacaagccgggccaacctgaataagctgctgaccgactacaccgaaatgaagaaggccatcctgcacgtgtattgggaagagttccagaaagacccagtcggcctgatgagcagagtggctcagcctgccagcaagaagatcgatcagaacaagctgaagcccgaaatggacgagaaggggaacctgacaaccgccggctttgcctgtagccagtgcggccagcccctgtttgtgtacaaactggaacaggtgagcgaaaagggcaaggcttacacgaattacttcggcagatgcaacgtggccgagcacgagaagctgatcctgctggcccagctgaagcctgagaaggatagcgatgaggcagtgacatattccctgggcaagttcggacagcgggccctggatttttattccattcatgtgaccaaggaatccacccaccccgtcaagcctcttgcccaaattgccggcaacagatacgccagcggccccgtgggcaaggccctgagcgacgcctgtatgggcaccatcgccagcttcctgtctaagtaccaggacattatcatcgagcaccagaaggtggtgaagggcaaccagaagagactggagagcctgcgcgagctggccggcaaggaaaacctggagtatcctagcgtgaccctgcctcctcagcctcatacaaaggagggcgtggatgcctacaacgaagtgatcgcccgggtgcggatgtgggtgaacctgaatctgtggcagaagctgaagctgtctagagacgacgccaagcccctgctgagactgaagggcttccccagcttccctctggtggagagacaggcaaatgaagtggactggtgggacatggtgtgtaacgtgaagaagctgatcaatgagaagaaggaggacggcaaagtgttctggcagaatctggccggctacaagcgtcaggaggccctgcggccctacctgagcagcgaggaagacagaaagaagggcaagaagttcgcccggtatcagctgggggacctgctgctgcacctcgagaagaagcacggcgaagactgggggaaggtgtacgatgaggcctgggagcggatcgataagaaggtggagggcctgagcaagcacatcaagctggaggaggaacggagatctgaggacgcccagagcaaggccgccctgaccgactggctgagagccaaggccagcttcgtcatcgaggggctgaaggaggccgacaaggacgagttctgccggtgcgaactgaagctgcagaagtggtacggagatctgagaggcaaacctttcgccatcgaggccgagaacagcatcctggacatcagcggcttcagcaagcagtacaactgcgcctttatttggcagaaggacggagtgaagaagctgaacctgtacctgatcatcaactatttcaagggcggcaagctgagattcaagaagatcaagcctgaagccttcgaggccaacagattctacaccgtgattaacaagaaaagcggagagatcgtgccaatggaagtgaacttcaacttcgacgaccctaacctgatcatcctgcccctggcatttggcaagcggcagggcagagagttcatctggaacgacctgctgtctctggagaccggcagcctgaagctggccaacggcagagtgatcgagaagacactgtacaacagacgaaccagacaagacgagcccgccctgtttgtggccctgaccttcgagagaagagaggtgctggacagcagcaatatcaagcctatgaacctgatcggcgtggaccggggcgagaacatccctgccgtgatcgcccttaccgaccccgagggatgccctctgagccggtttaaagacagcctgggcaaccctacccacatcctgagaattggcgagtcctacaaggagaagcagagaaccatccaggccaagaaggaggtggagcagcggcgggctggcggctactcccggaagtacgccagcaaggccaagaacctggccgacgacatggttagaaataccgccagagacctcctgtactacgctgtgacccaggacgccatgctgatcttcgagaacctgagcagaggcttcggcagacagggcaagagaaccttcatggccgagagacagtacacccggatggaggactggctgaccgccaagctggcctacgagggcctgccctctaagacctacctgtccaagaccttggcacagtacaccagcaagacatgctctaactgcggcttcacaatcacgagcgccgactacgaccgggtgctggagaaactgaagaagaccgccacaggctggatgaccaccattaacggcaaggagctgaaggtggagggccagatcacctactacaacaggtacaaacggcagaacgtggtgaaggacctgagcgtggaactggatagactgagcgaggaaagcgtaaacaatgacatcagcagctggaccaagggccggagcggcgaggccctgagcctgctgaagaagagattctcccacagaccagtgcaggagaagttcgtgtgtctgaactgcggcttcgagacccacgccgacgagcaagccgccctgaacatcgcccggtcttggcttttcctgcggagccaggagtacaagaagtaccagacaaacaagaccacaggcaacacagacaagagagccttcgtcgagacctggcagagcttctacagaaagaagctgaaggaggtgtggaagcctgccgtgggaagccccgctgccaagagagtgaagctggactaagctgccttctgcggggcttgccttctggccatgcccttcttctctcccttgcacctgtacctcttggtctttgaataaagcctgagtaggaagtctag

SEQ ID NO: 19844 - RNA, 3157 nt, synthetic construct
  source 1..3157: mol_type = other RNA
aggaaataagagagaaaagaagagtaagaagaaatataagagccaccatggcccctgctgccaagagagtgaagctggatagcagacaggagatcaagcggattaataaaattcggagaagactggtgaaggattctaacacaaagaaggctggcaagacacggggccctatgaagacactgctggtgagagtgatgacacccgacctgagagaaagactggaaaacctgagaaagaagcctgagaatatcccccagcccatcagcaacacaagccgggccaacctgaataagctgctgaccgactacaccgaaatgaagaaggccatcctgcacgtgtattgggaagagttccagaaagacccagtcggcctgatgagcagagtggctcagcctgccagcaagaagatcgatcagaacaagctgaagcccgaaatggacgagaaggggaacctgacaaccgccggctttgcctgtagccagtgcggccagcccctgtttgtgtacaaactggaacaggtgagcgaaaagggcaaggcttacacgaattacttcggcagatgcaacgtggccgagcacgagaagctgatcaagctggcccagctgaagcctgagaaggatagcgatgaggcagtgacatattccctgggcaagttcggacagcgggccctggatttttattccattcatgtgaccaaggaatccacccaccccgtcaagcctcttgcccaaattgccggcaacagatacgcctccagccccgtgggcaaggccctgagcgacgcctgtatgggcaccatcgccagcttcctgtctaagtaccaggacattatcatcgagcaccagaaggtggtgaagggcaaccagaagagactggagagcctgcgcgagctggccggcaaggaaaacctggagtatcctagcgtgaccctgcctcctcagcctcatacaaaggagggcgtggatgcctacaacgaagtgatcgcccgggtgcggatgtgggtgaacctgaatctgtggcagaagctgaagctgtctagagacgacgccaagcccctgctgagactgaagggcttccccagcttccctctggtggagagacaggcaaatgaagtggactggtgggacatggtgtgtaacgtgaagaagctgatcaatgagaagaaggaggacggcaaagtgttctggcagaatctggccggctacaagcgtcaggaggccctgcggccctacctgagcagcgaggaagacagaaagaagggcaagaagttcgcccggtatcagctgggggacctgctgctgcacctcgagaagaagcacggcgaagactgggggaaggtgtacgatgaggcctgggagcggatcgataagaaggtggagggcctgagcaagcacatcaagctggaggaggaacggagatctgaggacgcccagagcaaggccgccctgaccgactggctgagagccaaggccagcttcgtcatcgaggggctgaaggaggccgacaaggacgagttctgccggtgcgaactgaagctgcagaagtggtacggagatctgagaggcaaacctttcgccatcgaggccgagaacagcatcctggacatcagcggcttcagcaagcagtacaactgcgcctttatttggcagaaggacggagtgaagaagctgaacctgtacctgatcatcaactatttcaagggcggcaagctgagattcaagaagatcaagcctgaagccttcgaggccaacagattctacaccgtgattaacaagaaaagcggagagatcgtgccaatggaagtgaacttcaacttcgacgaccctaacctgatcatcctgcccctggcatttggcaagcggcagggcagagagttcatctggaacgacctgctgtctctggagaccggcagcctgaagctggccaacggcagagtgatcgagaagacactgtacaacagacgaaccagacaagacgagcccgccctgtttgtggccctgaccttcgagagaagagaggtgctggacagcagcaatatcaagcctatgaacctgatcggcgtggaccggggcgagaacatccctgccgtgatcgcccttaccgaccccgagggatgccctctgagccggtttaaagacagcctgggcaaccctacccacatcctgagaattggcgagtcctacaaggagaagcagagaaccatccaggccaagaaggaggtggagcagcggcgggctggcggctactcccggaagtacgccagcaaggccaagaacctggccgacgacatggttagaaataccgccagagacctcctgtactacgctgtgacccaggacgccatgctgatcttcgagaacctgagcagaggcttcggcagacagggcaagagaaccttcatggccgagagacagtacacccggatggaggactggctgaccgccaagctggcctacgagggcctgccctctaagacctacctgtccaagaccttggcacagtacaccagcaagacatgctctaactgcggcttcacaatcacgagcgccgactacgaccgggtgctggagaaactgaagaagaccgccacaggctggatgaccaccattaacggcaaggagctgaaggtggagggccagatcacctactacaacaggtacaaacggcagaacgtggtgaaggacctgagcgtggaactggatagactgagcgaggaaagcgtaaacaatgacatcagcagctggaccaagggccggagcggcgaggccctgagcctgctgaagaagagattctcccacagaccagtgcaggagaagttcgtgtgtctgaactgcggcttcgagacccacgccgacgagcaagccgccctgaacatcgcccggtcttggcttttcctgcggagccaggagtacaagaagtaccagacaaacaagaccacaggcaacacagacaagagagccttcgtcgagacctggcagagcttctacagaaagaagctgaaggaggtgtggaagcctgccgtgggaagccccgctgccaagagagtgaagctggactaagctgccttctgcggggcttgccttctggccatgcccttcttctctcccttgcacctgtacctcttggtctttgaataaagcctgagtaggaagtctag

SEQ ID NO: 19845 - RNA, 3154 nt, synthetic construct
  source 1..3154: mol_type = other RNA
aggaaataagagagaaaagaagagtaagaagaaatataagagccaccatggcccctgctgccaagagagtgaagctggatagcagacaggagatcaagcggattaataaaattcggagaagactggtgaaggattctaacacaaagaaggctggcaagacaggccctatgaagacactgctggtgagagtgatgacacccgacctgagagaaagactggaaaacctgagaaagaagcctgagaatatcccccagcccatcagcaacacaagccgggccaacctgaataagctgctgaccgactacaccgaaatgaagaaggccatcctgcacgtgtattgggaagagttccagaaagacccagtcggcctgatgagcagagtggctcagcctgccagcaagaagatcgatcagaacaagctgaagcccgaaatggacgagaaggggaacctgacaaccgccggctttgcctgtagccagtgcggccagcccctgtttgtgtacaaactggaacaggtgagcgaaaagggcaaggcttacacgaattacttcggcagatgcaacgtggccgagcacgagaagctgatcctgctggcccagctgaagcctgagaaggatagcgatgaggcagtgacatattccctgggcaagttcggacagcgggccctggatttttattccattcatgtgaccaaggaatccacccaccccgtcaagcctcttgcccaaattgccggcaacagatacgccagcggccccgtgggcaaggccctgagcgacgcctgtatgggcaccatcgccagcttcctgtctaagtaccaggacattatcatcgagcaccagaaggtggtgaagggcaaccagaagagactggagagcctgcgcgagctggccggcaaggaaaacctggagtatcctagcgtgaccctgcctcctcagcctcatacaaaggagggcgtggatgcctacaacgaagtgatcgcccgggtgcggatgtgggtgaacctgaatctgtggcagaagctgaagctgtctagagacgacgccaagcccctgctgagactgaagaagttccccagcttccctctggtggagagacaggcaaatgaagtggactggtgggacatggtgtgtaacgtgaagaagctgatcaatgagaagaaggaggacggcaaagtgttctggcagaatctggccggctacaagcgtcaggaggccctgcggccctacctgagcagcgaggaagacagaaagaagggcaagaagttcgcccggtatcagctgggggacctgctgctgcacctcgagaagaagcacggcgaagactgggggaaggtgtacgatgaggcctgggagcggatcgataagaaggtggagggcctgagcaagcacatcaagctggaggaggaacggagatctgaggacgcccagagcaaggccgccctgaccgactggctgagagccaaggccagcttcgtcatcgaggggctgaaggaggccgacaaggacgagttctgccggtgcgaactgaagctgcagaagtggtacggagatctgagaggcaaacctttcgccatcgaggccgagaacagcatcctggacatcagcggcttcagcaagcagtacaactgcgcctttatttggcagaaggacggagtgaagaagctgaacctgtacctgatcatcaactatttcaagggcggcaagctgagattcaagaagatcaagcctgaagccttcgaggccaacagattctacaccgtgattaacaagaaaagcggagagatcgtgccaatggaagtgaacttcaacttcgacgaccctaacctgatcatcctgcccctggcatttggcaagcggcagggcagagagttcatctggaacgacctgctgtctctggagaccggcagcctgaagctggccaacggcagagtgatcgagaagacactgtacaacagacgaaccagacaagacgagcccgccctgtttgtggccctgaccttcgagagaagagaggtgctggacagcagcaatatcaagcctatgaacctgatcggcgtggaccggggcgagaacatccctgccgtgatcgcccttaccgaccccgagggatgccctctgagccggtttaaagacagcctgggcaaccctacccacatcctgagaattggcgagtcctacaaggagaagcagagaaccatccaggccaagaaggaggtggagcagcggcgggctggcggctactcccggaagtacgccagcaaggccaagaacctggccgacgacatggttagaaataccgccagagacctcctgtactacgctgtgacccaggacgccatgctgatcttcgagaacctgagcagaggcttcggcagacagggcaagagaaccttcatggccgagagacagtacacccggatggaggactggctgaccgccaagctggcctacgagggcctgccctctaagacctacctgtccaagaccttggcacagtacaccagcaagacatgctctaactgcggcttcacaatcacgagcgccgactacgaccgggtgctggagaaactgaagaagaccgccacaggctggatgaccaccattaacggcaaggagctgaaggtggagggccagatcacctactacaacaggtacaaacggcagaacgtggtgaaggacctgagcgtggaactggatagactgagcgaggaaagcgtaaacaatgacatcagcagctggaccaagggccggagcggcgaggccctgagcctgctgaagaagagattctcccacagaccagtgcaggagaagttcgtgtgtctgaactgcggcttcgagacccacgccgacgagcaagccgccctgaacatcgcccggtcttggcttttcctgcggagccaggagtacaagaagtaccagacaaacaagaccacaggcaacacagacaagagagccttcgtcgagacctggcagagcttctacagaaagaagctgaaggaggtgtggaagcctgccgtgggaagccccgctgccaagagagtgaagctggactaagctgccttctgcggggcttgccttctggccatgcccttcttctctcccttgcacctgtacctcttggtctttgaataaagcctgagtaggaagtctag

SEQ ID NO: 19846 - RNA, 3151 nt, synthetic construct; identical to SEQ ID NO: 19842
  source 1..3151: mol_type = other RNA
  modified_base 1..3151: mod_base = OTHER; note = each t is m1f

SEQ ID NO: 19847 - RNA, 3154 nt, synthetic construct; identical to SEQ ID NO: 19843
  source 1..3154: mol_type = other RNA
  modified_base 1..3154: mod_base = OTHER; note = each t is m1f

SEQ ID NO: 19848 - RNA, 3157 nt, synthetic construct; identical to SEQ ID NO: 19844
  source 1..3157: mol_type = other RNA
  modified_base 1..3157: mod_base = OTHER; note = each t is m1f

SEQ ID NO: 19849 - RNA, 3154 nt, synthetic construct; identical to SEQ ID NO: 19845
  source 1..3154: mol_type = other RNA
  modified_base 1..3154: mod_base = OTHER; note = each t is m1f

SEQ ID NO: 19850 - DNA, 3151 bp, synthetic construct
  source 1..3151: mol_type = other DNA
aggaaataagagagaaaagaagagtaagaagaaatataagagccaccatggcccctgctgccaagagagtgaagctggatagcagacaggagatcaagcggattaataaaattcggagaagactggtgaaggattctaacacaaagaaggctggcaagacaggccctatgaagacactgctggtgagagtgatgacacccgacctgagagaaagactggaaaacctgagaaagaagcctgagaatatcccccagcccatcagcaacacaagccgggccaacctgaataagctgctgaccgactacaccgaaatgaagaaggccatcctgcacgtgtattgggaagagttccagaaagacccagtcggcctgatgagcagagtggctcagcctgccagcaagaagatcgatcagaacaagctgaagcccgaaatggacgagaaggggaacctgacaaccgccggctttgcctgtagccagtgcggccagcccctgtttgtgtacaaactggaacaggtgagcgaaaagggcaaggcttacacgaattacttcggcagatgcaacgtggccgagcacgagaagctgatcctgctggcccagctgaagcctgagaaggatagcgatgaggcagtgacatattccctgggcaagttcggacagcgggccctggatttttattccattcatgtgaccaaggaatccacccaccccgtcaagcctcttgcccaaattgccggcaacagatacgccagcggccccgtgggcaaggccctgagcgacgcctgtatgggcaccatcgccagcttcctgtctaagtaccaggacattatcatcgagcaccagaaggtggtgaagggcaaccagaagagactggagagcctgcgcgagctggccggcaaggaaaacctggagtatcctagcgtgaccctgcctcctcagcctcatacaaaggagggcgtggatgcctacaacgaagtgatcgcccgggtgcggatgtgggtgaacctgaatctgtggcagaagctgaagctgtctagagacgacgccaagcccctgctgagactgaagggcttccccagcttccctctggtggagagacaggcaaatgaagtggactggtgggacatggtgtgtaacgtgaagaagctgatcaatgagaagaaggaggacggcaaagtgttctggcagaatctggccggctacaagcgtcaggaggccctgcggccctacctgagcagcgaggaagacagaaagaagggcaagaagttcgcccggtatcagctgggggacctgctgctgcacctcgagaagaagcacggcgaagactgggggaaggtgtacgatgaggcctgggagcggatcgataagaaggtggagggcctgagcaagcacatcaagctggaggaggaacggagatctgaggacgcccagagcaaggccgccctgaccgactggctgagagccaaggccagcttcgtcatcgaggggctgaaggaggccgacaaggacgagttctgccggtgcgaactgaagctgcagaagtggtacggagatctgagaggcaaacctttcgccatcgaggccgagaacagcatcctggacatcagcggcttcagcaagcagtacaactgcgcctttatttggcagaaggacggagtgaagaagctgaacctgtacctgatcatcaactatttcaagggcggcaagctgagattcaagaagatcaagcctgaagccttcgaggccaacagattctacaccgtgattaacaagaaaagcggagagatcgtgccaatggaagtgaacttcaacttcgacgaccctaacctgatcatcctgcccctggcatttggcaagcggcagggcagagagttcatctggaacgacctgctgtctctggagaccggcagcctgaagctggccaacggcagagtgatcgagaagacactgtacaacagacgaaccagacaagacgagcccgccctgtttgtggccctgaccttcgagagaagagaggtgctggacagcagcaatatcaagcctatgaacctgatcggcgtggaccggggcgagaacatccctgccgtgatcgcccttaccgaccccgagggatgccctctgagccggtttaaagacagcctgggcaaccctacccacatcctgagaattggcgagtcctacaaggagaagcagagaaccatccaggccaagaaggaggtggagcagcggcgggctggcggctactcccggaagtacgccagcaaggccaagaacctggccgacgacatggttagaaataccgccagagacctcctgtactacgctgtgacccaggacgccatgctgatcttcgagaacctgagcagaggcttcggcagacagggcaagagaaccttcatggccgagagacagtacacccggatggaggactggctgaccgccaagctggcctacgagggcctgtctaagacctacctgtccaagaccttggcacagtacaccagcaagacatgctctaactgcggcttcacaatcacgagcgccgactacgaccgggtgctggagaaactgaagaagaccgccacaggctggatgaccaccattaacggcaaggagctgaaggtggagggccagatcacctactacaacaggtacaaacggcagaacgtggtgaaggacctgagcgtggaactggatagactgagcgaggaaagcgtaaacaatgacatcagcagctggaccaagggccggagcggcgaggccctgagcctgctgaagaagagattctcccacagaccagtgcaggagaagttcgtgtgtctgaactgcggcttcgagacccacgccgacgagcaagccgccctgaacatcgcccggtcttggcttttcctgcggagccaggagtacaagaagtaccagacaaacaagaccacaggcaacacagacaagagagccttcgtcgagacctggcagagcttctacagaaagaagctgaaggaggtgtggaagcctgccgtgggaagccccgctgccaagagagtgaagctggactaagctgccttctgcggggcttgccttctggccatgcccttcttctctcccttgcacctgtacctcttggtctttgaataaagcctgagtaggaagtctag

SEQ ID NO: 19851 - DNA, 3154 bp, synthetic construct
  source 1..3154: mol_type = other DNA
aggaaataagagagaaaagaagagtaagaagaaatataagagccaccatggcccctgctgccaagagagtgaagctggatagcagacaggagatcaagcggattaataaaattcggagaagactggtgaaggattctaacacaaagaaggctggcaagacaggccctatgaagacactgctggtgagagtgatgacacccgacctgagagaaagactggaaaacctgagaaagaagcctgagaatatcccccagcccatcagcaacacaagccgggccaacctgaataagctgctgaccgactacaccgaaatgaagaaggccatcctgcacgtgtattgggaagagttccagaaagacccagtcggcctgatgagcagagtggctcagcctgccagcaagaagatcgatcagaacaagctgaagcccgaaatggacgagaaggggaacctgacaaccgccggctttgcctgtagccagtgcggccagcccctgtttgtgtacaaactggaacaggtgagcgaaaagggcaaggcttacacgaattacttcggcagatgcaacgtggccgagcacgagaagctgatcctgctggcccagctgaagcctgagaaggatagcgatgaggcagtgacatattccctgggcaagttcggacagcgggccctggatttttattccattcatgtgaccaaggaatccacccaccccgtcaagcctcttgcccaaattgccggcaacagatacgccagcggccccgtgggcaaggccctgagcgacgcctgtatgggcaccatcgccagcttcctgtctaagtaccaggacattatcatcgagcaccagaaggtggtgaagggcaaccagaagagactggagagcctgcgcgagctggccggcaaggaaaacctggagtatcctagcgtgaccctgcctcctcagcctcatacaaaggagggcgtggatgcctacaacgaagtgatcgcccgggtgcggatgtgggtgaacctgaatctgtggcagaagctgaagctgtctagagacgacgccaagcccctgctgagactgaagggcttccccagcttccctctggtggagagacaggcaaatgaagtggactggtgggacatggtgtgtaacgtgaagaagctgatcaatgagaagaaggaggacggcaaagtgttctggcagaatctggccggctacaagcgtcaggaggccctgcggccctacctgagcagcgaggaagacagaaagaagggcaagaagttcgcccggtatcagctgggggacctgctgctgcacctcgagaagaagcacggcgaagactgggggaaggtgtacgatgaggcctgggagcggatcgataagaaggtggagggcctgagcaagcacatcaagctggaggaggaacggagatctgaggacgcccagagcaaggccgccctgaccgactggctgagagccaaggccagcttcgtcatcgaggggctgaaggaggccgacaaggacgagttctgccggtgcgaactgaagctgcagaagtggtacggagatctgagaggcaaacctttcgccatcgaggccgagaacagcatcctggacatcagcggcttcagcaagcagtacaactgcgcctttatttggcagaaggacggagtgaagaagctgaacctgtacctgatcatcaactatttcaagggcggcaagctgagattcaagaagatcaagcctgaagccttcgaggccaacagattctacaccgtgattaacaagaaaagcggagagatcgtgccaatggaagtgaacttcaacttcgacgaccctaacctgatcatcctgcccctggcatttggcaagcggcagggcagagagttcatctggaacgacctgctgtctctggagaccggcagcctgaagctggccaacggcagagtgatcgagaagacactgtacaacagacgaaccagacaagacgagcccgccctgtttgtggccctgaccttcgagagaagagaggtgctggacagcagcaatatcaagcctatgaacctgatcggcgtggaccggggcgagaacatccctgccgtgatcgcccttaccgaccccgagggatgccctctgagccggtttaaagacagcctgggcaaccctacccacatcctgagaattggcgagtcctacaaggagaagcagagaaccatccaggccaagaaggaggtggagcagcggcgggctggcggctactcccggaagtacgccagcaaggccaagaacctggccgacgacatggttagaaataccgccagagacctcctgtactacgctgtgacccaggacgccatgctgatcttcgagaacctgagcagaggcttcggcagacagggcaagagaaccttcatggccgagagacagtacacccggatggaggactggctgaccgccaagctggcctacgagggcctgccctctaagacctacctgtccaagaccttggcacagtacaccagcaagacatgctctaactgcggcttcacaatcacgagcgccgactacgaccgggtgctggagaaactgaagaagaccgccacaggctggatgaccaccattaacggcaaggagctgaaggtggagggccagatcacctactacaacaggtacaaacggcagaacgtggtgaaggacctgagcgtggaactggatagactgagcgaggaaagcgtaaacaatgacatcagcagctggaccaagggccggagcggcgaggccctgagcctgctgaagaagagattctcccacagaccagtgcaggagaagttcgtgtgtctgaactgcggcttcgagacccacgccgacgagcaagccgccctgaacatcgcccggtcttggcttttcctgcggagccaggagtacaagaagtaccagacaaacaagaccacaggcaacacagacaagagagccttcgtcgagacctggcagagcttctacagaaagaagctgaaggaggtgtggaagcctgccgtgggaagccccgctgccaagagagtgaagctggactaagctgccttctgcggggcttgccttctggccatgcccttcttctctcccttgcacctgtacctcttggtctttgaataaagcctgagtaggaagtctag

SEQ ID NO: 19852 - DNA, 3157 bp, synthetic construct
  source 1..3157: mol_type = other DNA
aggaaataagagagaaaagaagagtaagaagaaatataagagccaccatggcccctgctgccaagagagtgaagctggatagcagacaggagatcaagcggattaataaaattcggagaagactggtgaaggattctaacacaaagaaggctggcaagacacggggccctatgaagacactgctggtgagagtgatgacacccgacctgagagaaagactggaaaacctgagaaagaagcctgagaatatcccccagcccatcagcaacacaagccgggccaacctgaataagctgctgaccgactacaccgaaatgaagaaggccatcctgcacgtgtattgggaagagttccagaaagacccagtcggcctgatgagcagagtggctcagcctgccagcaagaagatcgatcagaacaagctgaagcccgaaatggacgagaaggggaacctgacaaccgccggctttgcctgtagccagtgcggccagcccctgtttgtgtacaaactggaacaggtgagcgaaaagggcaaggcttacacgaattacttcggcagatgcaacgtggccgagcacgagaagctgatcaagctggcccagctgaagcctgagaaggatagcgatgaggcagtgacatattccctgggcaagttcggacagcgggccctggatttttattccattcatgtgaccaaggaatccacccaccccgtcaagcctcttgcccaaattgccggcaacagatacgcctccagccccgtgggcaaggccctgagcgacgcctgtatgggcaccatcgccagcttcctgtctaagtaccaggacattatcatcgagcaccagaaggtggtgaagggcaaccagaagagactggagagcctgcgcgagctggccggcaaggaaaacctggagtatcctagcgtgaccctgcctcctcagcctcatacaaaggagggcgtggatgcctacaacgaagtgatcgcccgggtgcggatgtgggtgaacctgaatctgtggcagaagctgaagctgtctagagacgacgccaagcccctgctgagactgaagggcttccccagcttccctctggtggagagacaggcaaatgaagtggactggtgggacatggtgtgtaacgtgaagaagctgatcaatgagaagaaggaggacggcaaagtgttctggcagaatctggccggctacaagcgtcaggaggccctgcggccctacctgagcagcgaggaagacagaaagaagggcaagaagttcgcccggtatcagctgggggacctgctgctgcacctcgagaagaagcacggcgaagactgggggaaggtgtacgatgaggcctgggagcggatcgataagaaggtggagggcctgagcaagcacatcaagctggaggaggaacggagatctgaggacgcccagagcaaggccgccctgaccgactggctgagagccaaggccagcttcgtcatcgaggggctgaaggaggccgacaaggacgagttctgccggtgcgaactgaagctgcagaagtggtacggagatctgagaggcaaacctttcgccatcgaggccgagaacagcatcctggacatcagcggcttcagcaagcagtacaactgcgcctttatttggcagaaggacggagtgaagaagctgaacctgtacctgatcatcaactatttcaagggcggcaagctgagattcaagaagatcaagcctgaagccttcgaggccaacagattctacaccgtgattaacaagaaaagcggagagatcgtgccaatggaagtgaacttcaacttcgacgaccctaacctgatcatcctgcccctggcatttggcaagcggcagggcagagagttcatctggaacgacctgctgtctctggagaccggcagcctgaagctggccaacggcagagtgatcgagaagacactgtacaacagacgaaccagacaagacgagcccgccctgtttgtggccctgaccttcgagagaagagaggtgctggacagcagcaatatcaagcctatgaacctgatcggcgtggaccggggcgagaacatccctgccgtgatcgcccttaccgaccccgagggatgccctctgagccggtttaaagacagcctgggcaaccctacccacatcctgagaattggcgagtcctacaaggagaagcagagaaccatccaggccaagaaggaggtggagcagcggcgggctggcggctactcccggaagtacgccagcaaggccaagaacctggccgacgacatggttagaaataccgccagagacctcctgtactacgctgtgacccaggacgccatgctgatcttcgagaacctgagcagaggcttcggcagacagggcaagagaaccttcatggccgagagacagtacacccggatggaggactggctgaccgccaagctggcctacgagggcctgccctctaagacctacctgtccaagaccttggcacagtacaccagcaagacatgctctaactgcggcttcacaatcacgagcgccgactacgaccgggtgctggagaaactgaagaagaccgccacaggctggatgaccaccattaacggcaaggagctgaaggtggagggccagatcacctactacaacaggtacaaacggcagaacgtggtgaaggacctgagcgtggaactggatagactgagcgaggaaagcgtaaacaatgacatcagcagctggaccaagggccggagcggcgaggccctgagcctgctgaagaagagattctcccacagaccagtgcaggagaagttcgtgtgtctgaactgcggcttcgagacccacgccgacgagcaagccgccctgaacatcgcccggtcttggcttttcctgcggagccaggagtacaagaagtaccagacaaacaagaccacaggcaacacagacaagagagccttcgtcgagacctggcagagcttctacagaaagaagctgaaggaggtgtggaagcctgccgtgggaagccccgctgccaagagagtgaagctggactaagctgccttctgcggggcttgccttctggccatgcccttcttctctcccttgcacctgtacctcttggtctttgaataaagcctgagtaggaagtctag

SEQ ID NO: 19853 - DNA, 3154 bp, synthetic construct
  source 1..3154: mol_type = other DNA
aggaaataagagagaaaagaagagtaagaagaaatataagagccaccatggcccctgctgccaagagagtgaagctggatagcagacaggagatcaagcggattaataaaattcggagaagactggtgaaggattctaacacaaagaaggctggcaagacaggccctatgaagacactgctggtgagagtgatgacacccgacctgagagaaagactggaaaacctgagaaagaagcctgagaatatcccccagcccatcagcaacacaagccgggccaacctgaataagctgctgaccgactacaccgaaatgaagaaggccatcctgcacgtgtattgggaagagttccagaaagacccagtcggcctgatgagcagagtggctcagcctgccagcaagaagatcgatcagaacaagctgaagcccgaaatggacgagaaggggaacctgacaaccgccggctttgcctgtagccagtgcggccagcccctgtttgtgtacaaactggaacaggtgagcgaaaagggcaaggcttacacgaattacttcggcagatgcaacgtggccgagcacgagaagctgatcctgctggcccagctgaagcctgagaaggatagcgatgaggcagtgacatattccctgggcaagttcggacagcgggccctggatttttattccattcatgtgaccaaggaatccacccaccccgtcaagcctcttgcccaaattgccggcaacagatacgccagcggccccgtgggcaaggccctgagcgacgcctgtatgggcaccatcgccagcttcctgtctaagtaccaggacattatcatcgagcaccagaaggtggtgaagggcaaccagaagagactggagagcctgcgcgagctggccggcaaggaaaacctggagtatcctagcgtgaccctgcctcctcagcctcatacaaaggagggcgtggatgcctacaacgaagtgatcgcccgggtgcggatgtgggtgaacctgaatctgtggcagaagctgaagctgtctagagacgacgccaagcccctgctgagactgaagaagttccccagcttccctctggtggagagacaggcaaatgaagtggactggtgggacatggtgtgtaacgtgaagaagctgatcaatgagaagaaggaggacggcaaagtgttctggcagaatctggccggctacaagcgtcaggaggccctgcggccctacctgagcagcgaggaagacagaaagaagggcaagaagttcgcccggtatcagctgggggacctgctgctgcacctcgagaagaagcacggcgaagactgggggaaggtgtacgatgaggcctgggagcggatcgataagaaggtggagggcctgagcaagcacatcaagctggaggaggaacggagatctgaggacgcccagagcaaggccgccctgaccgactggctgagagccaaggccagcttcgtcatcgaggggctgaaggaggccgacaaggacgagttctgccggtgcgaactgaagctgcagaagtggtacggagatctgagaggcaaacctttcgccatcgaggccgagaacagcatcctggacatcagcggcttcagcaagcagtacaactgcgcctttatttggcagaaggacggagtgaagaagctgaacctgtacctgatcatcaactatttcaagggcggcaagctgagattcaagaagatcaagcctgaagccttcgaggccaacagattctacaccgtgattaacaagaaaagcggagagatcgtgccaatggaagtgaacttcaacttcgacgaccctaacctgatcatcctgcccctggcatttggcaagcggcagggcagagagttcatctggaacgacctgctgtctctggagaccggcagcctgaagctggccaacggcagagtgatcgagaagacactgtacaacagacgaaccagacaagacgagcccgccctgtttgtggccctgaccttcgagagaagagaggtgctggacagcagcaatatcaagcctatgaacctgatcggcgtggaccggggcgagaacatccctgccgtgatcgcccttaccgaccccgagggatgccctctgagccggtttaaagacagcctgggcaaccctacccacatcctgagaattggcgagtcctacaaggagaagcagagaaccatccaggccaagaaggaggtggagcagcggcgggctggcggctactcccggaagtacgccagcaaggccaagaacctggccgacgacatggttagaaataccgccagagacctcctgtactacgctgtgacccaggacgccatgctgatcttcgagaacctgagcagaggcttcggcagacagggcaagagaaccttcatggccgagagacagtacacccggatggaggactggctgaccgccaagctggcctacgagggcctgccctctaagacctacctgtccaagaccttggcacagtacaccagcaagacatgctctaactgcggcttcacaatcacgagcgccgactacgaccgggtgctggagaaactgaagaagaccgccacaggctggatgaccaccattaacggcaaggagctgaaggtggagggccagatcacctactacaacaggtacaaacggcagaacgtggtgaaggacctgagcgtggaactggatagactgagcgaggaaagcgtaaacaatgacatcagcagctggaccaagggccggagcggcgaggccctgagcctgctgaagaagagattctcccacagaccagtgcaggagaagttcgtgtgtctgaactgcggcttcgagacccacgccgacgagcaagccgccctgaacatcgcccggtcttggcttttcctgcggagccaggagtacaagaagtaccagacaaacaagaccacaggcaacacagacaagagagccttcgtcgagacctggcagagcttctacagaaagaagctgaaggaggtgtggaagcctgccgtgggaagccccgctgccaagagagtgaagctggactaagctgccttctgcggggcttgccttctggccatgcccttcttctctcccttgcacctgtacctcttggtctttgaataaagcctgagtaggaagtctag

SEQ ID NO: 19854 - RNA, 2934 nt, synthetic construct; identical to SEQ ID NO: 19702
  source 1..2934: mol_type = other RNA
  modified_base 1..2934: mod_base = OTHER; note = each t is m1f

SEQ ID NO: 19855 - RNA, 109 nt, synthetic construct
  modified_base 1..4: mod_base = OTHER; note = linked via phosphorothioate bond
  modified_base 1: mod_base = OTHER; note = 2'-O-methyl-adenosine
  modified_base 2: mod_base = cm
  modified_base 3: mod_base = um
  modified_base 106..109: mod_base = OTHER; note = linked via phosphorothioate bond
  modified_base 107: mod_base = gm
  modified_base 108: mod_base = cm
  modified_base 109: mod_base = um
  source 1..109: mol_type = other RNA
actggcgcttctatctgattactctgagcgccatcaccagcgactatgtcgtagtgggtaaagctccctcttcggagggagcatcagagcaataacaaggagctgggct

SEQ ID NO: 19856 - RNA, 109 nt, synthetic construct
  modified_base 1..4: mod_base = OTHER; note = linked via phosphorothioate bond
  modified_base 1: mod_base = OTHER; note = 2'-O-methyl-adenosine
  modified_base 2: mod_base = cm
  modified_base 3: mod_base = um
  modified_base 106..109: mod_base = OTHER; note = linked via phosphorothioate bond
  modified_base 107: mod_base = gm
  modified_base 108: mod_base = um
  modified_base 109: mod_base = gm
  source 1..109: mol_type = other RNA
actggcgcttctatctgattactctgagcgccatcaccagcgactatgtcgtagtgggtaaagctccctcttcggagggagcatcagagtgtgatagtggtggagagtg

SEQ ID NO: 19857 - RNA, 109 nt, synthetic construct
  modified_base 1..4: mod_base = OTHER; note = linked via phosphorothioate bond
  modified_base 1: mod_base = OTHER; note = 2'-O-methyl-adenosine
  modified_base 2: mod_base = cm
  modified_base 3: mod_base = um
  modified_base 106..109: mod_base = OTHER; note = linked via phosphorothioate bond
  modified_base 107: mod_base = gm
  modified_base 108: mod_base = OTHER; note = 2'-O-methyl-adenosine
  modified_base 109: mod_base = um
  source 1..109: mol_type = other RNA
actggcgcttctatctgattactctgagcgccatcaccagcgactatgtcgtagtgggtaaagctccctcttcggagggagcatcagagtggagcccacacaagcagat

SEQ ID NO: 19858 - RNA, 109 nt, synthetic construct
  modified_base 1..4: mod_base = OTHER; note = linked via phosphorothioate bond
  modified_base 1: mod_base = OTHER; note = 2'-O-methyl-adenosine
  modified_base 2: mod_base = cm
  modified_base 3: mod_base = um
  modified_base 106..109: mod_base = OTHER; note = linked via phosphorothioate bond
  modified_base 107: mod_base = cm
  modified_base 108: mod_base = OTHER; note = 2'-O-methyl-adenosine
  modified_base 109: mod_base = gm
  source 1..109: mol_type = other RNA
actggcgcttctatctgattactctgagcgccatcaccagcgactatgtcgtagtgggtaaagctccctcttcggagggagcatcagagagggacaaataaatgggcag

SEQ ID NO: 19859 - RNA, 109 nt, synthetic construct
  modified_base 1..4: mod_base = OTHER; note = linked via phosphorothioate bond
  modified_base 1: mod_base = OTHER; note = 2'-O-methyl-adenosine
  modified_base 2: mod_base = cm
  modified_base 3: mod_base = um
  modified_base 106..109: mod_base = OTHER; note = linked via phosphorothioate bond
  modified_base 107: mod_base = um
  modified_base 108: mod_base = OTHER; note = 2'-O-methyl-adenosine
  modified_base 109: mod_base = cm
  source 1..109: mol_type = other RNA
actggcgcttctatctgattactctgagcgccatcaccagcgactatgtcgtagtgggtaaagctccctcttcggagggagcatcagagtctgcctttctactggatac

SEQ ID NO: 19860 - RNA, 109 nt, synthetic construct
  modified_base 1..4: mod_base = OTHER; note = linked via phosphorothioate bond
  modified_base 1: mod_base = OTHER; note = 2'-O-methyl-adenosine
  modified_base 2: mod_base = cm
  modified_base 3: mod_base = um
  modified_base 106..109: mod_base = OTHER; note = linked via phosphorothioate bond
  modified_base 107: mod_base = gm
  modified_base 108: mod_base = cm
  modified_base 109: mod_base = um
  source 1..109: mol_type = other RNA
actggcgcttctatctgattactctgagcgccatcaccagcgactatgtcgtagtgggtaaagctccctcttcggagggagcatcagagtcagaagaagcctctgtgct

SEQ ID NO: 19861 - RNA, 109 nt, synthetic construct
  modified_base 1..4: mod_base = OTHER; note = linked via phosphorothioate bond
  modified_base 1: mod_base = OTHER; note = 2'-O-methyl-adenosine
  modified_base 2: mod_base = cm
  modified_base 3: mod_base = um
  modified_base 106..109: mod_base = OTHER; note = linked via phosphorothioate bond
  modified_base 107: mod_base = OTHER; note = 2'-O-methyl-adenosine
  modified_base 108: mod_base = cm
  modified_base 109: mod_base = um
  source 1..109: mol_type = other RNA
actggcgcttctatctgattactctgagcgccatcaccagcgactatgtcgtagtgggtaaagctccctcttcggagggagcatcagagttctaggtttggaaagcact

SEQ ID NO: 19862 - RNA, 109 nt, synthetic construct
  modified_base 1..4: mod_base = OTHER; note = linked via phosphorothioate bond
  modified_base 1: mod_base = OTHER; note = 2'-O-methyl-adenosine
  modified_base 2: mod_base = cm
  modified_base 3: mod_base = um
  modified_base 106..109: mod_base = OTHER; note = linked via phosphorothioate bond
  modified_base 107: mod_base = OTHER; note = 2'-O-methyl-adenosine
  modified_base 108: mod_base = gm
  modified_base 109: mod_base = cm
  source 1..109: mol_type = other RNA
actggcgcttctatctgattactctgagcgccatcaccagcgactatgtcgtagtgggtaaagctccctcttcggagggagcatcagagagcagtgagcagcagtcagc

SEQ ID NO: 19863 - protein, 979 aa, synthetic construct
MQEGKRINKIRRRLVKDSNTKKAGKTGPMKTLLVRVMTPDLRERLENLRKKPENIPQPISNTSQANLNKLLTDYTEMKKAILHVYWEEFQKDPVGLMSRVAQPASKKIDQNKLKPEMDEKGNLTTAGFACSQCGQPLFVYKLEQVSEKGKAYTNYFGRCNVAEHEKLILLAQLKPEKDSDEAVTYSLGKFGQRALDFYSIHVTKESTHPVKPLAQIAGNRYASGPVGKALSDACMGTIASFLSKYQDIIIEHQKVVKGNQKRLESLRELAGKENLEYPSVTLPPQPHTKEGVDAYNEVIARVRMWVNLNLWQKLKLSRDDAKPLLRLKGFPSFPLVERQANEVDWWDMVCNVKKLINEKKEDGKVFWQNLAGYKRQEALRPYLSSEEDRKKGKKFARYQLGDLLLHLEKKHGEDWGKVYDEAWERIDKKVEGLSKHIKLEEERRSEDAQSKAALTDWLRAKASFVIEGLKEADKDEFCRCELKLQKWYGDLRGKPFAIEAENSILDISGFSKQYNCAFIWQKDGVKKLNLYLIINYFKGGKLRFKKIKPEAFEANRFYTVINKKSGEIVPMEVNFNFDDPNLIILPLAFGKRQGREFIWNDLLSLETGSLKLANGRVIEKTLYNRRTRQDEPALFVALTFERREVLDSSNIKPMNLIGVDRGENIPAVIALTDPEGCPLSRFKDSLGNPTHILRIGESYKEKQRTIQAKKEVEQRRAGGYSRKYASKAKNLADDMVRNTARDLLYYAVTQDAMLIFENLSRGFGRQGKRTFMAERQYTRMEDWLTAKLAYEGLPSKTYLSKTLAQYTSKTCSNCGFTITSADYDRVLEKLKKTATGWMTTINGKELKVEGQITYYNRYKRQNVVKDLSVELDRLSEESVNNDISSWTKGRSGEALSLLKKRFSHRPVQEKFVCLNCGFETHADEQAALNIARSWLFLRSQEYKKYQTNKTTGNTDKRAFVETWQSFYRKKLKEVWKPAV

SEQ ID NO: 19864 - protein, 979 aa, synthetic construct
MQEGKRINKIRRRLVKDSNTKKAGKTGPMKTLLVRVMTPDLRERLENLRKKPENIPQPISNTSRANLNKLLTDYTEMKKAILHVYWEEFQKDPVGLMSRVAQPASKKIDQNKLKPEMDEKGNLTTAGFACSQCGQPLFVYKLEQVSEKGKAYTNYFGRCNVAEHEKLIKLAQLKPEKDSDEAVTYSLGKFGQRALDFYSIHVTKESTHPVKPLAQIAGNRYASGPVGKALSDACMGTIASFLSKYQDIIIEHQKVVKGNQKRLESLRELAGKENLEYPSVTLPPQPHTKEGVDAYNEVIARVRMWVNLNLWQKLKLSRDDAKPLLRLKGFPSFPLVERQANEVDWWDMVCNVKKLINEKKEDGKVFWQNLAGYKRQEALRPYLSSEEDRKKGKKFARYQLGDLLLHLEKKHGEDWGKVYDEAWERIDKKVEGLSKHIKLEEERRSEDAQSKAALTDWLRAKASFVIEGLKEADKDEFCRCELKLQKWYGDLRGKPFAIEAENSILDISGFSKQYNCAFIWQKDGVKKLNLYLIINYFKGGKLRFKKIKPEAFEANRFYTVINKKSGEIVPMEVNFNFDDPNLIILPLAFGKRQGREFIWNDLLSLETGSLKLANGRVIEKTLYNRRTRQDEPALFVALTFERREVLDSSNIKPMNLIGVDRGENIPAVIALTDPEGCPLSRFKDSLGNPTHILRIGESYKEKQRTIQAKKEVEQRRAGGYSRKYASKAKNLADDMVRNTARDLLYYAVTQDAMLIFENLSRGFGRQGKRTFMAERQYTRMEDWLTAKLAYEGLPSKTYLSKTLAQYTSKTCSNCGFTITSADYDRVLEKLKKTATGWMTTINGKELKVEGQITYYNRYKRQNVVKDLSVELDRLSEESVNNDISSWTKGRSGEALSLLKKRFSHRPVQEKFVCLNCGFETHADEQAALNIARSWLFLRSQEYKKYQTNKTTGNTDKRAFVETWQSFYRKKLKEVWKPAV

SEQ ID NO: 19865 - protein, 979 aa, synthetic construct
MQEGKRINKIRRRLVKDSNTKKAGKTGPMKTLLVRVMTPDLRERLENLRKKPENIPQPISNTSRANLNKLLTDYTEMKKAILHVYWEEFQKDPVGLMSRVAQPASKKIDQNKLKPEMDEKGNLTTAGFACSQCGQPLFVYKLEQVSEKGKAYTNYFGRCNVAEHEKLIQLAQLKPEKDSDEAVTYSLGKFGQRALDFYSIHVTKESTHPVKPLAQIAGNRYASGPVGKALSDACMGTIASFLSKYQDIIIEHQKVVKGNQKRLESLRELAGKENLEYPSVTLPPQPHTKEGVDAYNEVIARVRMWVNLNLWQKLKLSRDDAKPLLRLKGFPSFPLVERQANEVDWWDMVCNVKKLINEKKEDGKVFWQNLAGYKRQEALRPYLSSEEDRKKGKKFARYQLGDLLLHLEKKHGEDWGKVYDEAWERIDKKVEGLSKHIKLEEERRSEDAQSKAALTDWLRAKASFVIEGLKEADKDEFCRCELKLQKWYGDLRGKPFAIEAENSILDISGFSKQYNCAFIWQKDGVKKLNLYLIINYFKGGKLRFKKIKPEAFEANRFYTVINKKSGEIVPMEVNFNFDDPNLIILPLAFGKRQGREFIWNDLLSLETGSLKLANGRVIEKTLYNRRTRQDEPALFVALTFERREVLDSSNIKPMNLIGVDRGENIPAVIALTDPEGCPLSRFKDSLGNPTHILRIGESYKEKQRTIQAKKEVEQRRAGGYSRKYASKAKNLADDMVRNTARDLLYYAVTQDAMLIFENLSRGFGRQGKRTFMAERQYTRMEDWLTAKLAYEGLPSKTYLSKTLAQYTSKTCSNCGFTITSADYDRVLEKLKKTATGWMTTINGKELKVEGQITYYNRYKRQNVVKDLSVELDRLSEESVNNDISSWTKGRSGEALSLLKKRFSHRPVQEKFVCLNCGFETHADEQAALNIARSWLFLRSQEYKKYQTNKTTGNTDKRAFVETWQSFYRKKLKEVWKPAV

SEQ ID NO: 19866 - protein, 979 aa, synthetic construct
MQEGKRINKIRRRLVKDSNTKKAGKTGPMKTLLVRVMTPDLRERLENLRKKPENIPQPISNTSRANLNKLLTDYTEMKKAILHVYWEEFQKDPVGLMSRVAQPASKKIDQNKLKPEMDEKGNLTTAGFACSQCGQPLFVYKLEQVSEKGKAYTNYFGRCNVAEHEKLILLDQLKPEKDSDEAVTYSLGKFGQRALDFYSIHVTKESTHPVKPLAQIAGNRYASGPVGKALSDACMGTIASFLSKYQDIIIEHQKVVKGNQKRLESLRELAGKENLEYPSVTLPPQPHTKEGVDAYNEVIARVRMWVNLNLWQKLKLSRDDAKPLLRLKGFPSFPLVERQANEVDWWDMVCNVKKLINEKKEDGKVFWQNLAGYKRQEALRPYLSSEEDRKKGKKFARYQLGDLLLHLEKKHGEDWGKVYDEAWERIDKKVEGLSKHIKLEEERRSEDAQSKAALTDWLRAKASFVIEGLKEADKDEFCRCELKLQKWYGDLRGKPFAIEAENSILDISGFSKQYNCAFIWQKDGVKKLNLYLIINYFKGGKLRFKKIKPEAFEANRFYTVINKKSGEIVPMEVNFNFDDPNLIILPLAFGKRQGREFIWNDLLSLETGSLKLANGRVIEKTLYNRRTRQDEPALFVALTFERREVLDSSNIKPMNLIGVDRGENIPAVIALTDPEGCPLSRFKDSLGNPTHILRIGESYKEKQRTIQAKKEVEQRRAGGYSRKYASKAKNLADDMVRNTARDLLYYAVTQDAMLIFENLSRGFGRQGKRTFMAERQYTRMEDWLTAKLAYEGLPSKTYLSKTLAQYTSKTCSNCGFTITSADYDRVLEKLKKTATGWMTTINGKELKVEGQITYYNRYKRQNVVKDLSVELDRLSEESVNNDISSWTKGRSGEALSLLKKRFSHRPVQEKFVCLNCGFETHADEQAALNIARSWLFLRSQEYKKYQTNKTTGNTDKRAFVETWQSFYRKKLKEVWKPAV

SEQ ID NO: 19867 - protein, 979 aa, synthetic construct
MQEGKRINKIRRRLVKDSNTKKAGKTGPMKTLLVRVMTPDLRERLENLRKKPENIPQPISNTSRANLNKLLTDYTEMKKAILHVYWEEFQKDPVGLMSRVAQPASKKIDQNKLKPEMDEKGNLTTAGFACSQCGQPLFVYKLEQVSEKGKAYTNYFGRCNVAEHEKLILLYQLKPEKDSDEAVTYSLGKFGQRALDFYSIHVTKESTHPVKPLAQIAGNRYASGPVGKALSDACMGTIASFLSKYQDIIIEHQKVVKGNQKRLESLRELAGKENLEYPSVTLPPQPHTKEGVDAYNEVIARVRMWVNLNLWQKLKLSRDDAKPLLRLKGFPSFPLVERQANEVDWWDMVCNVKKLINEKKEDGKVFWQNLAGYKRQEALRPYLSSEEDRKKGKKFARYQLGDLLLHLEKKHGEDWGKVYDEAWERIDKKVEGLSKHIKLEEERRSEDAQSKAALTDWLRAKASFVIEGLKEADKDEFCRCELKLQKWYGDLRGKPFAIEAENSILDISGFSKQYNCAFIWQKDGVKKLNLYLIINYFKGGKLRFKKIKPEAFEANRFYTVINKKSGEIVPMEVNFNFDDPNLIILPLAFGKRQGREFIWNDLLSLETGSLKLANGRVIEKTLYNRRTRQDEPALFVALTFERREVLDSSNIKPMNLIGVDRGENIPAVIALTDPEGCPLSRFKDSLGNPTHILRIGESYKEKQRTIQAKKEVEQRRAGGYSRKYASKAKNLADDMVRNTARDLLYYAVTQDAMLIFENLSRGFGRQGKRTFMAERQYTRMEDWLTAKLAYEGLPSKTYLSKTLAQYTSKTCSNCGFTITSADYDRVLEKLKKTATGWMTTINGKELKVEGQITYYNRYKRQNVVKDLSVELDRLSEESVNNDISSWTKGRSGEALSLLKKRFSHRPVQEKFVCLNCGFETHADEQAALNIARSWLFLRSQEYKKYQTNKTTGNTDKRAFVETWQSFYRKKLKEVWKPAV

SEQ ID NO: 19868 - protein, 979 aa, synthetic construct
MQEGKRINKIRRRLVKDSNTKKAGKTGPMKTLLVRVMTPDLRERLENLRKKPENIPQPISNTSRANLNKLLTDYTEMKKAILHVYWEEFQKDPVGLMSRVAQPASKKIDQNKLKPEMDEKGNLTTAGFACSQCGQPLFVYKLEQVSEKGKAYTNYFGRCNVAEHEKLILLSQLKPEKDSDEAVTYSLGKFGQRALDFYSIHVTKESTHPVKPLAQIAGNRYASGPVGKALSDACMGTIASFLSKYQDIIIEHQKVVKGNQKRLESLRELAGKENLEYPSVTLPPQPHTKEGVDAYNEVIARVRMWVNLNLWQKLKLSRDDAKPLLRLKGFPSFPLVERQANEVDWWDMVCNVKKLINEKKEDGKVFWQNLAGYKRQEALRPYLSSEEDRKKGKKFARYQLGDLLLHLEKKHGEDWGKVYDEAWERIDKKVEGLSKHIKLEEERRSEDAQSKAALTDWLRAKASFVIEGLKEADKDEFCRCELKLQKWYGDLRGKPFAIEAENSILDISGFSKQYNCAFIWQKDGVKKLNLYLIINYFKGGKLRFKKIKPEAFEANRFYTVINKKSGEIVPMEVNFNFDDPNLIILPLAFGKRQGREFIWNDLLSLETGSLKLANGRVIEKTLYNRRTRQDEPALFVALTFERREVLDSSNIKPMNLIGVDRGENIPAVIALTDPEGCPLSRFKDSLGNPTHILRIGESYKEKQRTIQAKKEVEQRRAGGYSRKYASKAKNLADDMVRNTARDLLYYAVTQDAMLIFENLSRGFGRQGKRTFMAERQYTRMEDWLTAKLAYEGLPSKTYLSKTLAQYTSKTCSNCGFTITSADYDRVLEKLKKTATGWMTTINGKELKVEGQITYYNRYKRQNVVKDLSVELDRLSEESVNNDISSWTKGRSGEALSLLKKRFSHRPVQEKFVCLNCGFETHADEQAALNIARSWLFLRSQEYKKYQTNKTTGNTDKRAFVETWQSFYRKKLKEVWKPAV

SEQ ID NO: 19869 - protein, 979 aa, synthetic construct
MQEGKRINKIRRRLVKDSNTKKAGKTGPMKTLLVRVMTPDLRERLENLRKKPENIPQPISNTSRANLNKLLTDYTEMKKAILHVYWEEFQKDPVGLMSRVAQPASKKIDQNKLKPEMDEKGNLTTAGFACSQCGQPLFVYKLEQVSEKGKAYTNYFGRCNVAEHEKLILLAQLKPEKDSDEAVTYSLGKFGQRALDFYSIHVTKESTHPVKPLAQIAGNRYASTPVGKALSDACMGTIASFLSKYQDIIIEHQKVVKGNQKRLESLRELAGKENLEYPSVTLPPQPHTKEGVDAYNEVIARVRMWVNLNLWQKLKLSRDDAKPLLRLKGFPSFPLVERQANEVDWWDMVCNVKKLINEKKEDGKVFWQNLAGYKRQEALRPYLSSEEDRKKGKKFARYQLGDLLLHLEKKHGEDWGKVYDEAWERIDKKVEGLSKHIKLEEERRSEDAQSKAALTDWLRAKASFVIEGLKEADKDEFCRCELKLQKWYGDLRGKPFAIEAENSILDISGFSKQYNCAFIWQKDGVKKLNLYLIINYFKGGKLRFKKIKPEAFEANRFYTVINKKSGEIVPMEVNFNFDDPNLIILPLAFGKRQGREFIWNDLLSLETGSLKLANGRVIEKTLYNRRTRQDEPALFVALTFERREVLDSSNIKPMNLIGVDRGENIPAVIALTDPEGCPLSRFKDSLGNPTHILRIGESYKEKQRTIQAKKEVEQRRAGGYSRKYASKAKNLADDMVRNTARDLLYYAVTQDAMLIFENLSRGFGRQGKRTFMAERQYTRMEDWLTAKLAYEGLPSKTYLSKTLAQYTSKTCSNCGFTITSADYDRVLEKLKKTATGWMTTINGKELKVEGQITYYNRYKRQNVVKDLSVELDRLSEESVNNDISSWTKGRSGEALSLLKKRFSHRPVQEKFVCLNCGFETHADEQAALNIARSWLFLRSQEYKKYQTNKTTGNTDKRAFVETWQSFYRKKLKEVWKPAV

SEQ ID NO: 19870 - protein, 979 aa, synthetic construct
MQEGKRINKIRRRLVKDSNTKKAGKTGPMKTLLVRVMTPDLRERLENLRKKPENIPQPISNTSRANLNKLLTDYTEMKKAILHVYWEEFQKDPVGLMSRVAQPASKKIDQNKLKPEMDEKGNLTTAGFACSQCGQPLFVYKLEQVSEKGKAYTNYFGRCNVAEHEKLILLAQLKPEKDSDEAVTYSLGKFGQRALDFYSIHVTKESTHPVKPLAQIAGNRYASGPVGKALSDACMGTIASFLSKYQDIIIEHQKVVKGNQKRLESLRELAGKENLEYPSVTLPPQPHTKEGVDAYNEVIARVRTWVNLNLWQKLKLSRDDAKPLLRLKGFPSFPLVERQANEVDWWDMVCNVKKLINEKKEDGKVFWQNLAGYKRQEALRPYLSSEEDRKKGKKFARYQLGDLLLHLEKKHGEDWGKVYDEAWERIDKKVEGLSKHIKLEEERRSEDAQSKAALTDWLRAKASFVIEGLKEADKDEFCRCELKLQKWYGDLRGKPFAIEAENSILDISGFSKQYNCAFIWQKDGVKKLNLYLIINYFKGGKLRFKKIKPEAFEANRFYTVINKKSGEIVPMEVNFNFDDPNLIILPLAFGKRQGREFIWNDLLSLETGSLKLANGRVIEKTLYNRRTRQDEPALFVALTFERREVLDSSNIKPMNLIGVDRGENIPAVIALTDPEGCPLSRFKDSLGNPTHILRIGESYKEKQRTIQAKKEVEQRRAGGYSRKYASKAKNLADDMVRNTARDLLYYAVTQDAMLIFENLSRGFGRQGKRTFMAERQYTRMEDWLTAKLAYEGLPSKTYLSKTLAQYTSKTCSNCGFTITSADYDRVLEKLKKTATGWMTTINGKELKVEGQITYYNRYKRQNVVKDLSVELDRLSEESVNNDISSWTKGRSGEALSLLKKRFSHRPVQEKFVCLNCGFETHADEQAALNIARSWLFLRSQEYKKYQTNKTTGNTDKRAFVETWQSFYRKKLKEVWKPAV

SEQ ID NO: 19871 - protein, 979 aa, synthetic construct
MQEGKRINKIRRRLVKDSNTKKAGKTGPMKTLLVRVMTPDLRERLENLRKKPENIPQPISNTSRANLNKLLTDYTEMKKAILHVYWEEFQKDPVGLMSRVAQPASKKIDQNKLKPEMDEKGNLTTAGFACSQCGQPLFVYKLEQVSEKGKAYTNYFGRCNVAEHEKLILLAQLKPEKDSDEAVTYSLGKFGQRALDFYSIHVTKESTHPVKPLAQIAGNRYASGPVGKALSDACMGTIASFLSKYQDIIIEHQKVVKGNQKRLESLRELAGKENLEYPSVTLPPQPHTKEGVDAYNEVIARVRMWVNLNLWQKLKLSRDDAKPLLRLKGFPSFPLVERQANEVDWWDMVCNVKKLINEKKEDGKVFWQNLAGYKRQEALRPYLSSEEDRKKGKKFARTQLGDLLLHLEKKHGEDWGKVYDEAWERIDKKVEGLSKHIKLEEERRSEDAQSKAALTDWLRAKASFVIEGLKEADKDEFCRCELKLQKWYGDLRGKPFAIEAENSILDISGFSKQYNCAFIWQKDGVKKLNLYLIINYFKGGKLRFKKIKPEAFEANRFYTVINKKSGEIVPMEVNFNFDDPNLIILPLAFGKRQGREFIWNDLLSLETGSLKLANGRVIEKTLYNRRTRQDEPALFVALTFERREVLDSSNIKPMNLIGVDRGENIPAVIALTDPEGCPLSRFKDSLGNPTHILRIGESYKEKQRTIQAKKEVEQRRAGGYSRKYASKAKNLADDMVRNTARDLLYYAVTQDAMLIFENLSRGFGRQGKRTFMAERQYTRMEDWLTAKLAYEGLPSKTYLSKTLAQYTSKTCSNCGFTITSADYDRVLEKLKKTATGWMTTINGKELKVEGQITYYNRYKRQNVVKDLSVELDRLSEESVNNDISSWTKGRSGEALSLLKKRFSHRPVQEKFVCLNCGFETHADEQAALNIARSWLFLRSQEYKKYQTNKTTGNTDKRAFVETWQSFYRKKLKEVWKPAV

SEQ ID NO: 19872 - protein, 979 aa, synthetic construct
MQEGKRINKIRRRLVKDSNTKKAGKTGPMKTLLVRVMTPDLRERLENLRKKPENIPQPISNTSRANLNKLLTDYTEMKKAILHVYWEEFQKDPVGLMSRVAQPASKKIDQNKLKPEMDEKGNLTTAGFACSQCGQPLFVYKLEQVSEKGKAYTNYFGRCNVAEHEKLILLAQLKPEKDSDEAVTYSLGKFGQRALDFYSIHVTKESTHPVKPLAQIAGNRYASGPVGKALSDACMGTIASFLSKYQDIIIEHQKVVKGNQKRLESLRELAGKENLEYPSVTLPPQPHTKEGVDAYNEVIARVRMWVNLNLWQKLKLSRDDAKPLLRLKGFPSFPLVERQANEVDWWDMVCNVKKLINEKKEDGKVFWQNLAGYKRQEALRPYLSSEEDRKKGKKFARYQLGDLLLHLEKKHGEDWGKVYDEAWERIDKKVEGLSKHIKLEEERRSEDAQSKAALTDWLRAKASFVIEGLKEADKDEFCRCELKLQKWYGDLRGKPFAIEAENSILDISGFSKQYNCAFIWQKDGVKKLNLYLIINYFKGGKLRFKKIKPEAFEANRFYTVINKKSGEIVPMEVNFNFDDPNLIILPLAFGKRQGREFIWNDLLSLETGSLKLANGRVIEKTLYNRRTRQDEPALFVALTFERREVLDSSNIKPMNLIGVDRGENIPAVIALTDPEGCPLSRFKDSLGNPTHILRIGESYKEKQRTIQAKKEVEQRRAGGYSRKYASKAKNLADDMVRNTARDLLYYAVTQDAMLIFENLSRGFGRQGKRTFMAERQYTRMEDWLTAKLAYEGLPSKTYLSKTLAQYTSKTCSNCGFTITSADYDRMLEKLKKTATGWMTTINGKELKVEGQITYYNRYKRQNVVKDLSVELDRLSEESVNNDISSWTKGRSGEALSLLKKRFSHRPVQEKFVCLNCGFETHADEQAALNIARSWLFLRSQEYKKYQTNKTTGNTDKRAFVETWQSFYRKKLKEVWKPAV

SEQ ID NO: 19873 - protein, 979 aa, synthetic construct
MQEGKRINKIRRRLVKDSNTKKAGKTGPMKTLLVRVMTPDLRERLENLRKKPENIPQPISNTSRANLNKLLTDYTEMKKAILHVYWEEFQKDPVGLMSRVAQPASKKIDQNKLKPEMDEKGNLTTAGFACSQCGQPLFVYKLEQVSEKGKAYTNYFGRCNVAEHEKLILLAQLKPEKDSDEAVTYSLGKFGQRALDFYSIHVTKESTHPVKPLAQIAGNRYASGPVGKALSDACMGTIASFLSKYQDIIIEHQKVVKGNQKRLESLRELAGKENLEYPSVTLPPQPHTKEGVDAYNEVIARVRMWVNLNLWQKLKLSRDDAKPLLRLKGFPSFPLVERQANEVDWWDMVCNVKKLINEKKEDGKVFWQNLAGYKRQEALRPYLSSEEDRKKGKKFARYQLGDLLLHLEKKHGEDWGKVYDEAWERIDKKVEGLSKHIKLEEERRSEDAQSKAALTDWLRAKASFVIEGLKEADKDEFCRCELKLQKWYGDLRGKPFAIEAENSILDISGFSKQYNCAFIWQKDGVKKLNLYLIINYFKGGKLRFKKIKPEAFEANRFYTVINKKSGEIVPMEVNFNFDDPNLIILPLAFGKRQGREFIWNDLLSLETGSLKLANGRVIEKTLYNRRTRQDEPALFVALTFERREVLDSSNIKPMNLIGVDRGENIPAVIALTDPEGCPLSRFKDSLGNPTHILRIGESYKEKQRTIQAKKEVEQRRAGGYSRKYASKAKNLADDMVRNTARDLLYYAVTQDAMLIFENLSRGFGRQGKRTFMAERQYTRMEDWLTAKLAYEGLPSKTYLSKTLAQYTSKTCSNCGFTITSADYDRVLEKLKKTATGWMTTINGKELKVEGQITYYNRYKRQNVVKDLSVELDRLSEESVNNDISSWDKGRSGEALSLLKKRFSHRPVQEKFVCLNCGFETHADEQAALNIARSWLFLRSQEYKKYQTNKTTGNTDKRAFVETWQSFYRKKLKEVWKPAV

SEQ ID NO: 19874 - protein, 979 aa, synthetic construct
MQEGKRINKIRRRLVKDSNTKKAGKTGPMKTLLVRVMTPDLRERLENLRKKPENIPQPISNTSRANLNKLLTDYTEMKKAILHVYWEEFQKDPVGLMSRVAQPASKKIDQNKLKPEMDEKGNLTTAGFACSQCGQPLFVYKLEQVSEKGKAYTNYFGRCNVAEHEKLILLAQLKPEKDSDEAVTYSLGKFGQRALDFYSIHVTKESTHPVKPLAQIAGNRYASGPVGKALSDACMGTIASFLSKYQDIIIEHQKVVKGNQKRLESLRELAGKENLEYPSVTLPPQPHTKEGVDAYNEVIARVRMWVNLNLWQKLKLSRDDAKPLLRLKGFPSFPLVERQANEVDWWDMVCNVKKLINEKKEDGKVFWQNLAGYKRQEALRPYLSSEEDRKKGKKFARYQLGDLLLHLEKKHGEDWGKVYDEAWERIDKKVEGLSKHIKLEEERRSEDAQSKAALTDWLRAKASFVIEGLKEADKDEFCRCELKLQKWYGDLRGKPFAIEAENSILDISGFSKQYNCAFIWQKDGVKKLNLYLIINYFKGGKLRFKKIKPEAFEANRFYTVINKKSGEIVPMEVNFNFDDPNLIILPLAFGKRQGREFIWNDLLSLETGSLKLANGRVIEKTLYNRRTRQDEPALFVALTFERREVLDSSNIKPMNLIGVDRGENIPAVIALTDPEGCPLSRFKDSLGNPTHILRIGESYKEKQRTIQAKKEVEQRRAGGYSRKYASKAKNLADDMVRNTARDLLYYAVTQDAMLIFENLSRGFGRQGKRTFMAERQYTRMEDWLTAKLAYEGLPSKTYLSKTLAQYTSKTCSNCGFTITSADYDRVLEKLKKTATGWMTTINGKELKVEGQITYYNRYKRQNVVKDLSVELDRLSEESVNNDISSWTKGRQGEALSLLKKRFSHRPVQEKFVCLNCGFETHADEQAALNIARSWLFLRSQEYKKYQTNKTTGNTDKRAFVETWQSFYRKKLKEVWKPAV

SEQ ID NO: 19875 - protein, 980 aa, synthetic construct
MQEIGKRINKIRRRLVKDSNTKKAGKTGPMKTLLVRVMTPDLRERLENLRKKPENIPQPISNTSQANLNKLLTDYTEMKKAILHVYWEEFQKDPVGLMSRVAQPASKKIDQNKLKPEMDEKGNLTTAGFACSQCGQPLFVYKLEQVSEKGKAYTNYFGRCNVAEHEKLILLAQLKPEKDSDEAVTYSLGKFGQRALDFYSIHVTKESTHPVKPLAQIAGNRYASGPVGKALSDACMGTIASFLSKYQDIIIEHQKVVKGNQKRLESLRELAGKENLEYPSVTLPPQPHTKEGVDAYNEVIARVRMWVNLNLWQKLKLSRDDAKPLLRLKGFPSFPLVERQANEVDWWDMVCNVKKLINEKKEDGKVFWQNLAGYKRQEALRPYLSSEEDRKKGKKFARYQLGDLLLHLEKKHGEDWGKVYDEAWERIDKKVEGLSKHIKLEEERRSEDAQSKAALTDWLRAKASFVIEGLKEADKDEFCRCELKLQKWYGDLRGKPFAIEAENSILDISGFSKQYNCAFIWQKDGVKKLNLYLIINYFKGGKLRFKKIKPEAFEANRFYTVINKKSGEIVPMEVNFNFDDPNLIILPLAFGKRQGREFIWNDLLSLETGSLKLANGRVIEKTLYNRRTRQDEPALFVALTFERREVLDSSNIKPMNLIGVDRGENIPAVIALTDPEGCPLSRFKDSLGNPTHILRIGESYKEKQRTIQAKKEVEQRRAGGYSRKYASKAKNLADDMVRNTARDLLYYAVTQDAMLIFENLSRGFGRQGKRTFMAERQYTRMEDWLTAKLAYEGLPSKTYLSKTLAQYTSKTCSNCGFTITSADYDRVLEKLKKTATGWMTTINGKELKVEGQITYYNRYKRQNVVKDLSVELDRLSEESVNNDISSWTKGRSGEALSLLKKRFSHRPVQEKFVCLNCGFETHADEQAALNIARSWLFLRSQEYKKYQTNKTTGNTDKRAFVETWQSFYRKKLKEVWKPAV

SEQ ID NO: 19876 - protein, 980 aa, synthetic construct
MQEIGKRINKIRRRLVKDSNTKKAGKTGPMKTLLVRVMTPDLRERLENLRKKPENIPQPISNTSRANLNKLLTDYTEMKKAILHVYWEEFQKDPVGLMSRVAQPASKKIDQNKLKPEMDEKGNLTTAGFACSQCGQPLFVYKLEQVSEKGKAYTNYFGRCNVAEHEKLIKLAQLKPEKDSDEAVTYSLGKFGQRALDFYSIHVTKESTHPVKPLAQIAGNRYASGPVGKALSDACMGTIASFLSKYQDIIIEHQKVVKGNQKRLESLRELAGKENLEYPSVTLPPQPHTKEGVDAYNEVIARVRMWVNLNLWQKLKLSRDDAKPLLRLKGFPSFPLVERQANEVDWWDMVCNVKKLINEKKEDGKVFWQNLAGYKRQEALRPYLSSEEDRKKGKKFARYQLGDLLLHLEKKHGEDWGKVYDEAWERIDKKVEGLSKHIKLEEERRSEDAQSKAALTDWLRAKASFVIEGLKEADKDEFCRCELKLQKWYGDLRGKPFAIEAENSILDISGFSKQYNCAFIWQKDGVKKLNLYLIINYFKGGKLRFKKIKPEAFEANRFYTVINKKSGEIVPMEVNFNFDDPNLIILPLAFGKRQGREFIWNDLLSLETGSLKLANGRVIEKTLYNRRTRQDEPALFVALTFERREVLDSSNIKPMNLIGVDRGENIPAVIALTDPEGCPLSRFKDSLGNPTHILRIGESYKEKQRTIQAKKEVEQRRAGGYSRKYASKAKNLADDMVRNTARDLLYYAVTQDAMLIFENLSRGFGRQGKRTFMAERQYTRMEDWLTAKLAYEGLPSKTYLSKTLAQYTSKTCSNCGFTITSADYDRVLEKLKKTATGWMTTINGKELKVEGQITYYNRYKRQNVVKDLSVELDRLSEESVNNDISSWTKGRSGEALSLLKKRFSHRPVQEKFVCLNCGFETHADEQAALNIARSWLFLRSQEYKKYQTNKTTGNTDKRAFVETWQSFYRKKLKEVWKPAV

SEQ ID NO: 19877 - protein, 980 aa, synthetic construct
MQEIGKRINKIRRRLVKDSNTKKAGKTGPMKTLLVRVMTPDLRERLENLRKKPENIPQPISNTSRANLNKLLTDYTEMKKAILHVYWEEFQKDPVGLMSRVAQPASKKIDQNKLKPEMDEKGNLTTAGFACSQCGQPLFVYKLEQVSEKGKAYTNYFGRCNVAEHEKLIQLAQLKPEKDSDEAVTYSLGKFGQRALDFYSIHVTKESTHPVKPLAQIAGNRYASGPVGKALSDACMGTIASFLSKYQDIIIEHQKVVKGNQKRLESLRELAGKENLEYPSVTLPPQPHTKEGVDAYNEVIARVRMWVNLNLWQKLKLSRDDAKPLLRLKGFPSFPLVERQANEVDWWDMVCNVKKLINEKKEDGKVFWQNLAGYKRQEALRPYLSSEEDRKKGKKFARYQLGDLLLHLEKKHGEDWGKVYDEAWERIDKKVEGLSKHIKLEEERRSEDAQSKAALTDWLRAKASFVIEGLKEADKDEFCRCELKLQKWYGDLRGKPFAIEAENSILDISGFSKQYNCAFIWQKDGVKKLNLYLIINYFKGGKLRFKKIKPEAFEANRFYTVINKKSGEIVPMEVNFNFDDPNLIILPLAFGKRQGREFIWNDLLSLETGSLKLANGRVIEKTLYNRRTRQDEPALFVALTFERREVLDSSNIKPMNLIGVDRGENIPAVIALTDPEGCPLSRFKDSLGNPTHILRIGESYKEKQRTIQAKKEVEQRRAGGYSRKYASKAKNLADDMVRNTARDLLYYAVTQDAMLIFENLSRGFGRQGKRTFMAERQYTRMEDWLTAKLAYEGLPSKTYLSKTLAQYTSKTCSNCGFTITSADYDRVLEKLKKTATGWMTTINGKELKVEGQITYYNRYKRQNVVKDLSVELDRLSEESVNNDISSWTKGRSGEALSLLKKRFSHRPVQEKFVCLNCGFETHADEQAALNIARSWLFLRSQEYKKYQTNKTTGNTDKRAFVETWQSFYRKKLKEVWKPAV

SEQ ID NO: 19878 - protein, 980 aa, synthetic construct
MQEIGKRINKIRRRLVKDSNTKKAGKTGPMKTLLVRVMTPDLRERLENLRKKPENIPQPISNTSRANLNKLLTDYTEMKKAILHVYWEEFQKDPVGLMSRVAQPASKKIDQNKLKPEMDEKGNLTTAGFACSQCGQPLFVYKLEQVSEKGKAYTNYFGRCNVAEHEKLILLDQLKPEKDSDEAVTYSLGKFGQRALDFYSIHVTKESTHPVKPLAQIAGNRYASGPVGKALSDACMGTIASFLSKYQDIIIEHQKVVKGNQKRLESLRELAGKENLEYPSVTLPPQPHTKEGVDAYNEVIARVRMWVNLNLWQKLKLSRDDAKPLLRLKGFPSFPLVERQANEVDWWDMVCNVKKLINEKKEDGKVFWQNLAGYKRQEALRPYLSSEEDRKKGKKFARYQLGDLLLHLEKKHGEDWGKVYDEAWERIDKKVEGLSKHIKLEEERRSEDAQSKAALTDWLRAKASFVIEGLKEADKDEFCRCELKLQKWYGDLRGKPFAIEAENSILDISGFSKQYNCAFIWQKDGVKKLNLYLIINYFKGGKLRFKKIKPEAFEANRFYTVINKKSGEIVPMEVNFNFDDPNLIILPLAFGKRQGREFIWNDLLSLETGSLKLANGRVIEKTLYNRRTRQDEPALFVALTFERREVLDSSNIKPMNLIGVDRGENIPAVIALTDPEGCPLSRFKDSLGNPTHILRIGESYKEKQRTIQAKKEVEQRRAGGYSRKYASKAKNLADDMVRNTARDLLYYAVTQDAMLIFENLSRGFGRQGKRTFMAERQYTRMEDWLTAKLAYEGLPSKTYLSKTLAQYTSKTCSNCGFTITSADYDRVLEKLKKTATGWMTTINGKELKVEGQITYYNRYKRQNVVKDLSVELDRLSEESVNNDISSWTKGRSGEALSLLKKRFSHRPVQEKFVCLNCGFETHADEQAALNIARSWLFLRSQEYKKYQTNKTTGNTDKRAFVETWQSFYRKKLKEVWKPAV

SEQ ID NO: 19879 - protein, 980 aa, synthetic construct
MQEIGKRINKIRRRLVKDSNTKKAGKTGPMKTLLVRVMTPDLRERLENLRKKPENIPQPISNTSRANLNKLLTDYTEMKKAILHVYWEEFQKDPVGLMSRVAQPASKKIDQNKLKPEMDEKGNLTTAGFACSQCGQPLFVYKLEQVSEKGKAYTNYFGRCNVAEHEKLILLYQLKPEKDSDEAVTYSLGKFGQRALDFYSIHVTKESTHPVKPLAQIAGNRYASGPVGKALSDACMGTIASFLSKYQDIIIEHQKVVKGNQKRLESLRELAGKENLEYPSVTLPPQPHTKEGVDAYNEVIARVRMWVNLNLWQKLKLSRDDAKPLLRLKGFPSFPLVERQANEVDWWDMVCNVKKLINEKKEDGKVFWQNLAGYKRQEALRPYLSSEEDRKKGKKFARYQLGDLLLHLEKKHGEDWGKVYDEAWERIDKKVEGLSKHIKLEEERRSEDAQSKAALTDWLRAKASFVIEGLKEADKDEFCRCELKLQKWYGDLRGKPFAIEAENSILDISGFSKQYNCAFIWQKDGVKKLNLYLIINYFKGGKLRFKKIKPEAFEANRFYTVINKKSGEIVPMEVNFNFDDPNLIILPLAFGKRQGREFIWNDLLSLETGSLKLANGRVIEKTLYNRRTRQDEPALFVALTFERREVLDSSNIKPMNLIGVDRGENIPAVIALTDPEGCPLSRFKDSLGNPTHILRIGESYKEKQRTIQAKKEVEQRRAGGYSRKYASKAKNLADDMVRNTARDLLYYAVTQDAMLIFENLSRGFGRQGKRTFMAERQYTRMEDWLTAKLAYEGLPSKTYLSKTLAQYTSKTCSNCGFTITSADYDRVLEKLKKTATGWMTTINGKELKVEGQITYYNRYKRQNVVKDLSVELDRLSEESVNNDISSWTKGRSGEALSLLKKRFSHRPVQEKFVCLNCGFETHADEQAALNIARSWLFLRSQEYKKYQTNKTTGNTDKRAFVETWQSFYRKKLKEVWKPAV

SEQ ID NO: 19880 - protein, 980 aa, synthetic construct
MQEIGKRINKIRRRLVKDSNTKKAGKTGPMKTLLVRVMTPDLRERLENLRKKPENIPQPISNTSRANLNKLLTDYTEMKKAILHVYWEEFQKDPVGLMSRVAQPASKKIDQNKLKPEMDEKGNLTTAGFACSQCGQPLFVYKLEQVSEKGKAYTNYFGRCNVAEHEKLILLSQLKPEKDSDEAVTYSLGKFGQRALDFYSIHVTKESTHPVKPLAQIAGNRYASGPVGKALSDACMGTIASFLSKYQDIIIEHQKVVKGNQKRLESLRELAGKENLEYPSVTLPPQPHTKEGVDAYNEVIARVRMWVNLNLWQKLKLSRDDAKPLLRLKGFPSFPLVERQANEVDWWDMVCNVKKLINEKKEDGKVFWQNLAGYKRQEALRPYLSSEEDRKKGKKFARYQLGDLLLHLEKKHGEDWGKVYDEAWERIDKKVEGLSKHIKLEEERRSEDAQSKAALTDWLRAKASFVIEGLKEADKDEFCRCELKLQKWYGDLRGKPFAIEAENSILDISGFSKQYNCAFIWQKDGVKKLNLYLIINYFKGGKLRFKKIKPEAFEANRFYTVINKKSGEIVPMEVNFNFDDPNLIILPLAFGKRQGREFIWNDLLSLETGSLKLANGRVIEKTLYNRRTRQDEPALFVALTFERREVLDSSNIKPMNLIGVDRGENIPAVIALTDPEGCPLSRFKDSLGNPTHILRIGESYKEKQRTIQAKKEVEQRRAGGYSRKYASKAKNLADDMVRNTARDLLYYAVTQDAMLIFENLSRGFGRQGKRTFMAERQYTRMEDWLTAKLAYEGLPSKTYLSKTLAQYTSKTCSNCGFTITSADYDRVLEKLKKTATGWMTTINGKELKVEGQITYYNRYKRQNVVKDLSVELDRLSEESVNNDISSWTKGRSGEALSLLKKRFSHRPVQEKFVCLNCGFETHADEQAALNIARSWLFLRSQEYKKYQTNKTTGNTDKRAFVETWQSFYRKKLKEVWKPAV

SEQ ID NO: 19881 - protein, 980 aa, synthetic construct
MQEIGKRINKIRRRLVKDSNTKKAGKTGPMKTLLVRVMTPDLRERLENLRKKPENIPQPISNTSRANLNKLLTDYTEMKKAILHVYWEEFQKDPVGLMSRVAQPASKKIDQNKLKPEMDEKGNLTTAGFACSQCGQPLFVYKLEQVSEKGKAYTNYFGRCNVAEHEKLILLAQLKPEKDSDEAVTYSLGKFGQRALDFYSIHVTKESTHPVKPLAQIAGNRYASTPVGKALSDACMGTIASFLSKYQDIIIEHQKVVKGNQKRLESLRELAGKENLEYPSVTLPPQPHTKEGVDAYNEVIARVRMWVNLNLWQKLKLSRDDAKPLLRLKGFPSFPLVERQANEVDWWDMVCNVKKLINEKKEDGKVFWQNLAGYKRQEALRPYLSSEEDRKKGKKFARYQLGDLLLHLEKKHGEDWGKVYDEAWERIDKKVEGLSKHIKLEEERRSEDAQSKAALTDWLRAKASFVIEGLKEADKDEFCRCELKLQKWYGDLRGKPFAIEAENSILDISGFSKQYNCAFIWQKDGVKKLNLYLIINYFKGGKLRFKKIKPEAFEANRFYTVINKKSGEIVPMEVNFNFDDPNLIILPLAFGKRQGREFIWNDLLSLETGSLKLANGRVIEKTLYNRRTRQDEPALFVALTFERREVLDSSNIKPMNLIGVDRGENIPAVIALTDPEGCPLSRFKDSLGNPTHILRIGESYKEKQRTIQAKKEVEQRRAGGYSRKYASKAKNLADDMVRNTARDLLYYAVTQDAMLIFENLSRGFGRQGKRTFMAERQYTRMEDWLTAKLAYEGLPSKTYLSKTLAQYTSKTCSNCGFTITSADYDRVLEKLKKTATGWMTTINGKELKVEGQITYYNRYKRQNVVKDLSVELDRLSEESVNNDISSWTKGRSGEALSLLKKRFSHRPVQEKFVCLNCGFETHADEQAALNIARSWLFLRSQEYKKYQTNKTTGNTDKRAFVETWQSFYRKKLKEVWKPAV

SEQ ID NO: 19882 - protein, 980 aa, synthetic construct
MQEIGKRINKIRRRLVKDSNTKKAGKTGPMKTLLVRVMTPDLRERLENLRKKPENIPQPISNTSRANLNKLLTDYTEMKKAILHVYWEEFQKDPVGLMSRVAQPASKKIDQNKLKPEMDEKGNLTTAGFACSQCGQPLFVYKLEQVSEKGKAYTNYFGRCNVAEHEKLILLAQLKPEKDSDEAVTYSLGKFGQRALDFYSIHVTKESTHPVKPLAQIAGNRYASGPVGKALSDACMGTIASFLSKYQDIIIEHQKVVKGNQKRLESLRELAGKENLEYPSVTLPPQPHTKEGVDAYNEVIARVRTWVNLNLWQKLKLSRDDAKPLLRLKGFPSFPLVERQANEVDWWDMVCNVKKLINEKKEDGKVFWQNLAGYKRQEALRPYLSSEEDRKKGKKFARYQLGDLLLHLEKKHGEDWGKVYDEAWERIDKKVEGLSKHIKLEEERRSEDAQSKAALTDWLRAKASFVIEGLKEADKDEFCRCELKLQKWYGDLRGKPFAIEAENSILDISGFSKQYNCAFIWQKDGVKKLNLYLIINYFKGGKLRFKKIKPEAFEANRFYTVINKKSGEIVPMEVNFNFDDPNLIILPLAFGKRQGREFIWNDLLSLETGSLKLANGRVIEKTLYNRRTRQDEPALFVALTFERREVLDSSNIKPMNLIGVDRGENIPAVIALTDPEGCPLSRFKDSLGNPTHILRIGESYKEKQRTIQAKKEVEQRRAGGYSRKYASKAKNLADDMVRNTARDLLYYAVTQDAMLIFENLSRGFGRQGKRTFMAERQYTRMEDWLTAKLAYEGLPSKTYLSKTLAQYTSKTCSNCGFTITSADYDRVLEKLKKTATGWMTTINGKELKVEGQITYYNRYKRQNVVKDLSVELDRLSEESVNNDISSWTKGRSGEALSLLKKRFSHRPVQEKFVCLNCGFETHADEQAALNIARSWLFLRSQEYKKYQTNKTTGNTDKRAFVETWQSFYRKKLKEVWKPAV

SEQ ID NO: 19883 - protein, 980 aa, synthetic construct
MQEIGKRINKIRRRLVKDSNTKKAGKTGPMKTLLVRVMTPDLRERLENLRKKPENIPQPISNTSRANLNKLLTDYTEMKKAILHVYWEEFQKDPVGLMSRVAQPASKKIDQNKLKPEMDEKGNLTTAGFACSQCGQPLFVYKLEQVSEKGKAYTNYFGRCNVAEHEKLILLAQLKPEKDSDEAVTYSLGKFGQRALDFYSIHVTKESTHPVKPLAQIAGNRYASGPVGKALSDACMGTIASFLSKYQDIIIEHQKVVKGNQKRLESLRELAGKENLEYPSVTLPPQPHTKEGVDAYNEVIARVRMWVNLNLWQKLKLSRDDAKPLLRLKGFPSFPLVERQANEVDWWDMVCNVKKLINEKKEDGKVFWQNLAGYKRQEALRPYLSSEEDRKKGKKFARTQLGDLLLHLEKKHGEDWGKVYDEAWERIDKKVEGLSKHIKLEEERRSEDAQSKAALTDWLRAKASFVIEGLKEADKDEFCRCELKLQKWYGDLRGKPFAIEAENSILDISGFSKQYNCAFIWQKDGVKKLNLYLIINYFKGGKLRFKKIKPEAFEANRFYTVINKKSGEIVPMEVNFNFDDPNLIILPLAFGKRQGREFIWNDLLSLETGSLKLANGRVIEKTLYNRRTRQDEPALFVALTFERREVLDSSNIKPMNLIGVDRGENIPAVIALTDPEGCPLSRFKDSLGNPTHILRIGESYKEKQRTIQAKKEVEQRRAGGYSRKYASKAKNLADDMVRNTARDLLYYAVTQDAMLIFENLSRGFGRQGKRTFMAERQYTRMEDWLTAKLAYEGLPSKTYLSKTLAQYTSKTCSNCGFTITSADYDRVLEKLKKTATGWMTTINGKELKVEGQITYYNRYKRQNVVKDLSVELDRLSEESVNNDISSWTKGRSGEALSLLKKRFSHRPVQEKFVCLNCGFETHADEQAALNIARSWLFLRSQEYKKYQTNKTTGNTDKRAFVETWQSFYRKKLKEVWKPAV

SEQ ID NO: 19884 - protein, 980 aa, synthetic construct
MQEIGKRINKIRRRLVKDSNTKKAGKTGPMKTLLVRVMTPDLRERLENLRKKPENIPQPISNTSRANLNKLLTDYTEMKKAILHVYWEEFQKDPVGLMSRVAQPASKKIDQNKLKPEMDEKGNLTTAGFACSQCGQPLFVYKLEQVSEKGKAYTNYFGRCNVAEHEKLILLAQLKPEKDSDEAVTYSLGKFGQRALDFYSIHVTKESTHPVKPLAQIAGNRYASGPVGKALSDACMGTIASFLSKYQDIIIEHQKVVKGNQKRLESLRELAGKENLEYPSVTLPPQPHTKEGVDAYNEVIARVRMWVNLNLWQKLKLSRDDAKPLLRLKGFPSFPLVERQANEVDWWDMVCNVKKLINEKKEDGKVFWQNLAGYKRQEALRPYLSSEEDRKKGKKFARYQLGDLLLHLEKKHGEDWGKVYDEAWERIDKKVEGLSKHIKLEEERRSEDAQSKAALTDWLRAKASFVIEGLKEADKDEFCRCELKLQKWYGDLRGKPFAIEAENSILDISGFSKQYNCAFIWQKDGVKKLNLYLIINYFKGGKLRFKKIKPEAFEANRFYTVINKKSGEIVPMEVNFNFDDPNLIILPLAFGKRQGREFIWNDLLSLETGSLKLANGRVIEKTLYNRRTRQDEPALFVALTFERREVLDSSNIKPMNLIGVDRGENIPAVIALTDPEGCPLSRFKDSLGNPTHILRIGESYKEKQRTIQAKKEVEQRRAGGYSRKYASKAKNLADDMVRNTARDLLYYAVTQDAMLIFENLSRGFGRQGKRTFMAERQYTRMEDWLTAKLAYEGLPSKTYLSKTLAQYTSKTCSNCGFTITSADYDRMLEKLKKTATGWMTTINGKELKVEGQITYYNRYKRQNVVKDLSVELDRLSEESVNNDISSWTKGRSGEALSLLKKRFSHRPVQEKFVCLNCGFETHADEQAALNIARSWLFLRSQEYKKYQTNKTTGNTDKRAFVETWQSFYRKKLKEVWKPAV

SEQ ID NO: 19885 - protein, 980 aa, synthetic construct
MQEIGKRINKIRRRLVKDSNTKKAGKTGPMKTLLVRVMTPDLRERLENLRKKPENIPQPISNTSRANLNKLLTDYTEMKKAILHVYWEEFQKDPVGLMSRVAQPASKKIDQNKLKPEMDEKGNLTTAGFACSQCGQPLFVYKLEQVSEKGKAYTNYFGRCNVAEHEKLILLAQLKPEKDSDEAVTYSLGKFGQRALDFYSIHVTKESTHPVKPLAQIAGNRYASGPVGKALSDACMGTIASFLSKYQDIIIEHQKVVKGNQKRLESLRELAGKENLEYPSVTLPPQPHTKEGVDAYNEVIARVRMWVNLNLWQKLKLSRDDAKPLLRLKGFPSFPLVERQANEVDWWDMVCNVKKLINEKKEDGKVFWQNLAGYKRQEALRPYLSSEEDRKKGKKFARYQLGDLLLHLEKKHGEDWGKVYDEAWERIDKKVEGLSKHIKLEEERRSEDAQSKAALTDWLRAKASFVIEGLKEADKDEFCRCELKLQKWYGDLRGKPFAIEAENSILDISGFSKQYNCAFIWQKDGVKKLNLYLIINYFKGGKLRFKKIKPEAFEANRFYTVINKKSGEIVPMEVNFNFDDPNLIILPLAFGKRQGREFIWNDLLSLETGSLKLANGRVIEKTLYNRRTRQDEPALFVALTFERREVLDSSNIKPMNLIGVDRGENIPAVIALTDPEGCPLSRFKDSLGNPTHILRIGESYKEKQRTIQAKKEVEQRRAGGYSRKYASKAKNLADDMVRNTARDLLYYAVTQDAMLIFENLSRGFGRQGKRTFMAERQYTRMEDWLTAKLAYEGLPSKTYLSKTLAQYTSKTCSNCGFTITSADYDRVLEKLKKTATGWMTTINGKELKVEGQITYYNRYKRQNVVKDLSVELDRLSEESVNNDISSWDKGRSGEALSLLKKRFSHRPVQEKFVCLNCGFETHADEQAALNIARSWLFLRSQEYKKYQTNKTTGNTDKRAFVETWQSFYRKKLKEVWKPAV

SEQ ID NO: 19886 - protein, 980 aa, synthetic construct
MQEIGKRINKIRRRLVKDSNTKKAGKTGPMKTLLVRVMTPDLRERLENLRKKPENIPQPISNTSRANLNKLLTDYTEMKKAILHVYWEEFQKDPVGLMSRVAQPASKKIDQNKLKPEMDEKGNLTTAGFACSQCGQPLFVYKLEQVSEKGKAYTNYFGRCNVAEHEKLILLAQLKPEKDSDEAVTYSLGKFGQRALDFYSIHVTKESTHPVKPLAQIAGNRYASGPVGKALSDACMGTIASFLSKYQDIIIEHQKVVKGNQKRLESLRELAGKENLEYPSVTLPPQPHTKEGVDAYNEVIARVRMWVNLNLWQKLKLSRDDAKPLLRLKGFPSFPLVERQANEVDWWDMVCNVKKLINEKKEDGKVFWQNLAGYKRQEALRPYLSSEEDRKKGKKFARYQLGDLLLHLEKKHGEDWGKVYDEAWERIDKKVEGLSKHIKLEEERRSEDAQSKAALTDWLRAKASFVIEGLKEADKDEFCRCELKLQKWYGDLRGKPFAIEAENSILDISGFSKQYNCAFIWQKDGVKKLNLYLIINYFKGGKLRFKKIKPEAFEANRFYTVINKKSGEIVPMEVNFNFDDPNLIILPLAFGKRQGREFIWNDLLSLETGSLKLANGRVIEKTLYNRRTRQDEPALFVALTFERREVLDSSNIKPMNLIGVDRGENIPAVIALTDPEGCPLSRFKDSLGNPTHILRIGESYKEKQRTIQAKKEVEQRRAGGYSRKYASKAKNLADDMVRNTARDLLYYAVTQDAMLIFENLSRGFGRQGKRTFMAERQYTRMEDWLTAKLAYEGLPSKTYLSKTLAQYTSKTCSNCGFTITSADYDRVLEKLKKTATGWMTTINGKELKVEGQITYYNRYKRQNVVKDLSVELDRLSEESVNNDISSWTKGRQGEALSLLKKRFSHRPVQEKFVCLNCGFETHADEQAALNIARSWLFLRSQEYKKYQTNKTTGNTDKRAFVETWQSFYRKKLKEVWKPAV

SEQ ID NO: 19887 - protein, 979 aa, synthetic construct
MQEIKRINGIRRRLVKDSNTKKAGKTGPMKTLLVRVMTPDLRERLENLRKKPENIPQPISNTSQANLNKLLTDYTEMKKAILHVYWEEFQKDPVGLMSRVAQPASKKIDQNKLKPEMDEKGNLTTAGFACSQCGQPLFVYKLEQVSEKGKAYTNYFGRCNVAEHEKLILLAQLKPEKDSDEAVTYSLGKFGQRALDFYSIHVTKESTHPVKPLAQIAGNRYASGPVGKALSDACMGTIASFLSKYQDIIIEHQKVVKGNQKRLESLRELAGKENLEYPSVTLPPQPHTKEGVDAYNEVIARVRMWVNLNLWQKLKLSRDDAKPLLRLKGFPSFPLVERQANEVDWWDMVCNVKKLINEKKEDGKVFWQNLAGYKRQEALRPYLSSEEDRKKGKKFARYQLGDLLLHLEKKHGEDWGKVYDEAWERIDKKVEGLSKHIKLEEERRSEDAQSKAALTDWLRAKASFVIEGLKEADKDEFCRCELKLQKWYGDLRGKPFAIEAENSILDISGFSKQYNCAFIWQKDGVKKLNLYLIINYFKGGKLRFKKIKPEAFEANRFYTVINKKSGEIVPMEVNFNFDDPNLIILPLAFGKRQGREFIWNDLLSLETGSLKLANGRVIEKTLYNRRTRQDEPALFVALTFERREVLDSSNIKPMNLIGVDRGENIPAVIALTDPEGCPLSRFKDSLGNPTHILRIGESYKEKQRTIQAKKEVEQRRAGGYSRKYASKAKNLADDMVRNTARDLLYYAVTQDAMLIFENLSRGFGRQGKRTFMAERQYTRMEDWLTAKLAYEGLPSKTYLSKTLAQYTSKTCSNCGFTITSADYDRVLEKLKKTATGWMTTINGKELKVEGQITYYNRYKRQNVVKDLSVELDRLSEESVNNDISSWTKGRSGEALSLLKKRFSHRPVQEKFVCLNCGFETHADEQAALNIARSWLFLRSQEYKKYQTNKTTGNTDKRAFVETWQSFYRKKLKEVWKPAV

SEQ ID NO: 19888 - protein, 979 aa, synthetic construct
MQEIKRINGIRRRLVKDSNTKKAGKTGPMKTLLVRVMTPDLRERLENLRKKPENIPQPISNTSRANLNKLLTDYTEMKKAILHVYWEEFQKDPVGLMSRVAQPASKKIDQNKLKPEMDEKGNLTTAGFACSQCGQPLFVYKLEQVSEKGKAYTNYFGRCNVAEHEKLIKLAQLKPEKDSDEAVTYSLGKFGQRALDFYSIHVTKESTHPVKPLAQIAGNRYASGPVGKALSDACMGTIASFLSKYQDIIIEHQKVVKGNQKRLESLRELAGKENLEYPSVTLPPQPHTKEGVDAYNEVIARVRMWVNLNLWQKLKLSRDDAKPLLRLKGFPSFPLVERQANEVDWWDMVCNVKKLINEKKEDGKVFWQNLAGYKRQEALRPYLSSEEDRKKGKKFARYQLGDLLLHLEKKHGEDWGKVYDEAWERIDKKVEGLSKHIKLEEERRSEDAQSKAALTDWLRAKASFVIEGLKEADKDEFCRCELKLQKWYGDLRGKPFAIEAENSILDISGFSKQYNCAFIWQKDGVKKLNLYLIINYFKGGKLRFKKIKPEAFEANRFYTVINKKSGEIVPMEVNFNFDDPNLIILPLAFGKRQGREFIWNDLLSLETGSLKLANGRVIEKTLYNRRTRQDEPALFVALTFERREVLDSSNIKPMNLIGVDRGENIPAVIALTDPEGCPLSRFKDSLGNPTHILRIGESYKEKQRTIQAKKEVEQRRAGGYSRKYASKAKNLADDMVRNTARDLLYYAVTQDAMLIFENLSRGFGRQGKRTFMAERQYTRMEDWLTAKLAYEGLPSKTYLSKTLAQYTSKTCSNCGFTITSADYDRVLEKLKKTATGWMTTINGKELKVEGQITYYNRYKRQNVVKDLSVELDRLSEESVNNDISSWTKGRSGEALSLLKKRFSHRPVQEKFVCLNCGFETHADEQAALNIARSWLFLRSQEYKKYQTNKTTGNTDKRAFVETWQSFYRKKLKEVWKPAV

SEQ ID NO: 19889 - protein, 979 aa, synthetic construct
MQEIKRINGIRRRLVKDSNTKKAGKTGPMKTLLVRVMTPDLRERLENLRKKPENIPQPISNTSRANLNKLLTDYTEMKKAILHVYWEEFQKDPVGLMSRVAQPASKKIDQNKLKPEMDEKGNLTTAGFACSQCGQPLFVYKLEQVSEKGKAYTNYFGRCNVAEHEKLIQLAQLKPEKDSDEAVTYSLGKFGQRALDFYSIHVTKESTHPVKPLAQIAGNRYASGPVGKALSDACMGTIASFLSKYQDIIIEHQKVVKGNQKRLESLRELAGKENLEYPSVTLPPQPHTKEGVDAYNEVIARVRMWVNLNLWQKLKLSRDDAKPLLRLKGFPSFPLVERQANEVDWWDMVCNVKKLINEKKEDGKVFWQNLAGYKRQEALRPYLSSEEDRKKGKKFARYQLGDLLLHLEKKHGEDWGKVYDEAWERIDKKVEGLSKHIKLEEERRSEDAQSKAALTDWLRAKASFVIEGLKEADKDEFCRCELKLQKWYGDLRGKPFAIEAENSILDISGFSKQYNCAFIWQKDGVKKLNLYLIINYFKGGKLRFKKIKPEAFEANRFYTVINKKSGEIVPMEVNFNFDDPNLIILPLAFGKRQGREFIWNDLLSLETGSLKLANGRVIEKTLYNRRTRQDEPALFVALTFERREVLDSSNIKPMNLIGVDRGENIPAVIALTDPEGCPLSRFKDSLGNPTHILRIGESYKEKQRTIQAKKEVEQRRAGGYSRKYASKAKNLADDMVRNTARDLLYYAVTQDAMLIFENLSRGFGRQGKRTFMAERQYTRMEDWLTAKLAYEGLPSKTYLSKTLAQYTSKTCSNCGFTITSADYDRVLEKLKKTATGWMTTINGKELKVEGQITYYNRYKRQNVVKDLSVELDRLSEESVNNDISSWTKGRSGEALSLLKKRFSHRPVQEKFVCLNCGFETHADEQAALNIARSWLFLRSQEYKKYQTNKTTGNTDKRAFVETWQSFYRKKLKEVWKPAV

SEQ ID NO: 19890 - protein, 979 aa, synthetic construct
MQEIKRINGIRRRLVKDSNTKKAGKTGPMKTLLVRVMTPDLRERLENLRKKPENIPQPISNTSRANLNKLLTDYTEMKKAILHVYWEEFQKDPVGLMSRVAQPASKKIDQNKLKPEMDEKGNLTTAGFACSQCGQPLFVYKLEQVSEKGKAYTNYFGRCNVAEHEKLILLDQLKPEKDSDEAVTYSLGKFGQRALDFYSIHVTKESTHPVKPLAQIAGNRYASGPVGKALSDACMGTIASFLSKYQDIIIEHQKVVKGNQKRLESLRELAGKENLEYPSVTLPPQPHTKEGVDAYNEVIARVRMWVNLNLWQKLKLSRDDAKPLLRLKGFPSFPLVERQANEVDWWDMVCNVKKLINEKKEDGKVFWQNLAGYKRQEALRPYLSSEEDRKKGKKFARYQLGDLLLHLEKKHGEDWGKVYDEAWERIDKKVEGLSKHIKLEEERRSEDAQSKAALTDWLRAKASFVIEGLKEADKDEFCRCELKLQKWYGDLRGKPFAIEAENSILDISGFSKQYNCAFIWQKDGVKKLNLYLIINYFKGGKLRFKKIKPEAFEANRFYTVINKKSGEIVPMEVNFNFDDPNLIILPLAFGKRQGREFIWNDLLSLETGSLKLANGRVIEKTLYNRRTRQDEPALFVALTFERREVLDSSNIKPMNLIGVDRGENIPAVIALTDPEGCPLSRFKDSLGNPTHILRIGESYKEKQRTIQAKKEVEQRRAGGYSRKYASKAKNLADDMVRNTARDLLYYAVTQDAMLIFENLSRGFGRQGKRTFMAERQYTRMEDWLTAKLAYEGLPSKTYLSKTLAQYTSKTCSNCGFTITSADYDRVLEKLKKTATGWMTTINGKELKVEGQITYYNRYKRQNVVKDLSVELDRLSEESVNNDISSWTKGRSGEALSLLKKRFSHRPVQEKFVCLNCGFETHADEQAALNIARSWLFLRSQEYKKYQTNKTTGNTDKRAFVETWQSFYRKKLKEVWKPAV

SEQ ID NO: 19891 - protein, 979 aa, synthetic construct
MQEIKRINGIRRRLVKDSNTKKAGKTGPMKTLLVRVMTPDLRERLENLRKKPENIPQPISNTSRANLNKLLTDYTEMKKAILHVYWEEFQKDPVGLMSRVAQPASKKIDQNKLKPEMDEKGNLTTAGFACSQCGQPLFVYKLEQVSEKGKAYTNYFGRCNVAEHEKLILLYQLKPEKDSDEAVTYSLGKFGQRALDFYSIHVTKESTHPVKPLAQIAGNRYASGPVGKALSDACMGTIASFLSKYQDIIIEHQKVVKGNQKRLESLRELAGKENLEYPSVTLPPQPHTKEGVDAYNEVIARVRMWVNLNLWQKLKLSRDDAKPLLRLKGFPSFPLVERQANEVDWWDMVCNVKKLINEKKEDGKVFWQNLAGYKRQEALRPYLSSEEDRKKGKKFARYQLGDLLLHLEKKHGEDWGKVYDEAWERIDKKVEGLSKHIKLEEERRSEDAQSKAALTDWLRAKASFVIEGLKEADKDEFCRCELKLQKWYGDLRGKPFAIEAENSILDISGFSKQYNCAFIWQKDGVKKLNLYLIINYFKGGKLRFKKIKPEAFEANRFYTVINKKSGEIVPMEVNFNFDDPNLIILPLAFGKRQGREFIWNDLLSLETGSLKLANGRVIEKTLYNRRTRQDEPALFVALTFERREVLDSSNIKPMNLIGVDRGENIPAVIALTDPEGCPLSRFKDSLGNPTHILRIGESYKEKQRTIQAKKEVEQRRAGGYSRKYASKAKNLADDMVRNTARDLLYYAVTQDAMLIFENLSRGFGRQGKRTFMAERQYTRMEDWLTAKLAYEGLPSKTYLSKTLAQYTSKTCSNCGFTITSADYDRVLEKLKKTATGWMTTINGKELKVEGQITYYNRYKRQNVVKDLSVELDRLSEESVNNDISSWTKGRSGEALSLLKKRFSHRPVQEKFVCLNCGFETHADEQAALNIARSWLFLRSQEYKKYQTNKTTGNTDKRAFVETWQSFYRKKLKEVWKPAV

SEQ ID NO: 19892 - protein, 979 aa, synthetic construct
MQEIKRINGIRRRLVKDSNTKKAGKTGPMKTLLVRVMTPDLRERLENLRKKPENIPQPISNTSRANLNKLLTDYTEMKKAILHVYWEEFQKDPVGLMSRVAQPASKKIDQNKLKPEMDEKGNLTTAGFACSQCGQPLFVYKLEQVSEKGKAYTNYFGRCNVAEHEKLILLSQLKPEKDSDEAVTYSLGKFGQRALDFYSIHVTKESTHPVKPLAQIAGNRYASGPVGKALSDACMGTIASFLSKYQDIIIEHQKVVKGNQKRLESLRELAGKENLEYPSVTLPPQPHTKEGVDAYNEVIARVRMWVNLNLWQKLKLSRDDAKPLLRLKGFPSFPLVERQANEVDWWDMVCNVKKLINEKKEDGKVFWQNLAGYKRQEALRPYLSSEEDRKKGKKFARYQLGDLLLHLEKKHGEDWGKVYDEAWERIDKKVEGLSKHIKLEEERRSEDAQSKAALTDWLRAKASFVIEGLKEADKDEFCRCELKLQKWYGDLRGKPFAIEAENSILDISGFSKQYNCAFIWQKDGVKKLNLYLIINYFKGGKLRFKKIKPEAFEANRFYTVINKKSGEIVPMEVNFNFDDPNLIILPLAFGKRQGREFIWNDLLSLETGSLKLANGRVIEKTLYNRRTRQDEPALFVALTFERREVLDSSNIKPMNLIGVDRGENIPAVIALTDPEGCPLSRFKDSLGNPTHILRIGESYKEKQRTIQAKKEVEQRRAGGYSRKYASKAKNLADDMVRNTARDLLYYAVTQDAMLIFENLSRGFGRQGKRTFMAERQYTRMEDWLTAKLAYEGLPSKTYLSKTLAQYTSKTCSNCGFTITSADYDRVLEKLKKTATGWMTTINGKELKVEGQITYYNRYKRQNVVKDLSVELDRLSEESVNNDISSWTKGRSGEALSLLKKRFSHRPVQEKFVCLNCGFETHADEQAALNIARSWLFLRSQEYKKYQTNKTTGNTDKRAFVETWQSFYRKKLKEVWKPAV

SEQ ID NO: 19893 - protein, 979 aa, synthetic construct
MQEIKRINGIRRRLVKDSNTKKAGKTGPMKTLLVRVMTPDLRERLENLRKKPENIPQPISNTSRANLNKLLTDYTEMKKAILHVYWEEFQKDPVGLMSRVAQPASKKIDQNKLKPEMDEKGNLTTAGFACSQCGQPLFVYKLEQVSEKGKAYTNYFGRCNVAEHEKLILLAQLKPEKDSDEAVTYSLGKFGQRALDFYSIHVTKESTHPVKPLAQIAGNRYASTPVGKALSDACMGTIASFLSKYQDIIIEHQKVVKGNQKRLESLRELAGKENLEYPSVTLPPQPHTKEGVDAYNEVIARVRMWVNLNLWQKLKLSRDDAKPLLRLKGFPSFPLVERQANEVDWWDMVCNVKKLINEKKEDGKVFWQNLAGYKRQEALRPYLSSEEDRKKGKKFARYQLGDLLLHLEKKHGEDWGKVYDEAWERIDKKVEGLSKHIKLEEERRSEDAQSKAALTDWLRAKASFVIEGLKEADKDEFCRCELKLQKWYGDLRGKPFAIEAENSILDISGFSKQYNCAFIWQKDGVKKLNLYLIINYFKGGKLRFKKIKPEAFEANRFYTVINKKSGEIVPMEVNFNFDDPNLIILPLAFGKRQGREFIWNDLLSLETGSLKLANGRVIEKTLYNRRTRQDEPALFVALTFERREVLDSSNIKPMNLIGVDRGENIPAVIALTDPEGCPLSRFKDSLGNPTHILRIGESYKEKQRTIQAKKEVEQRRAGGYSRKYASKAKNLADDMVRNTARDLLYYAVTQDAMLIFENLSRGFGRQGKRTFMAERQYTRMEDWLTAKLAYEGLPSKTYLSKTLAQYTSKTCSNCGFTITSADYDRVLEKLKKTATGWMTTINGKELKVEGQITYYNRYKRQNVVKDLSVELDRLSEESVNNDISSWTKGRSGEALSLLKKRFSHRPVQEKFVCLNCGFETHADEQAALNIARSWLFLRSQEYKKYQTNKTTGNTDKRAFVETWQSFYRKKLKEVWKPAV

SEQ ID NO: 19894 - protein, 979 aa, synthetic construct
MQEIKRINGIRRRLVKDSNTKKAGKTGPMKTLLVRVMTPDLRERLENLRKKPENIPQPISNTSRANLNKLLTDYTEMKKAILHVYWEEFQKDPVGLMSRVAQPASKKIDQNKLKPEMDEKGNLTTAGFACSQCGQPLFVYKLEQVSEKGKAYTNYFGRCNVAEHEKLILLAQLKPEKDSDEAVTYSLGKFGQRALDFYSIHVTKESTHPVKPLAQIAGNRYASGPVGKALSDACMGTIASFLSKYQDIIIEHQKVVKGNQKRLESLRELAGKENLEYPSVTLPPQPHTKEGVDAYNEVIARVRTWVNLNLWQKLKLSRDDAKPLLRLKGFPSFPLVERQANEVDWWDMVCNVKKLINEKKEDGKVFWQNLAGYKRQEALRPYLSSEEDRKKGKKFARYQLGDLLLHLEKKHGEDWGKVYDEAWERIDKKVEGLSKHIKLEEERRSEDAQSKAALTDWLRAKASFVIEGLKEADKDEFCRCELKLQKWYGDLRGKPFAIEAENSILDISGFSKQYNCAFIWQKDGVKKLNLYLIINYFKGGKLRFKKIKPEAFEANRFYTVINKKSGEIVPMEVNFNFDDPNLIILPLAFGKRQGREFIWNDLLSLETGSLKLANGRVIEKTLYNRRTRQDEPALFVALTFERREVLDSSNIKPMNLIGVDRGENIPAVIALTDPEGCPLSRFKDSLGNPTHILRIGESYKEKQRTIQAKKEVEQRRAGGYSRKYASKAKNLADDMVRNTARDLLYYAVTQDAMLIFENLSRGFGRQGKRTFMAERQYTRMEDWLTAKLAYEGLPSKTYLSKTLAQYTSKTCSNCGFTITSADYDRVLEKLKKTATGWMTTINGKELKVEGQITYYNRYKRQNVVKDLSVELDRLSEESVNNDISSWTKGRSGEALSLLKKRFSHRPVQEKFVCLNCGFETHADEQAALNIARSWLFLRSQEYKKYQTNKTTGNTDKRAFVETWQSFYRKKLKEVWKPAV

SEQ ID NO: 19895 - protein, 979 aa, synthetic construct
MQEIKRINGIRRRLVKDSNTKKAGKTGPMKTLLVRVMTPDLRERLENLRKKPENIPQPISNTSRANLNKLLTDYTEMKKAILHVYWEEFQKDPVGLMSRVAQPASKKIDQNKLKPEMDEKGNLTTAGFACSQCGQPLFVYKLEQVSEKGKAYTNYFGRCNVAEHEKLILLAQLKPEKDSDEAVTYSLGKFGQRALDFYSIHVTKESTHPVKPLAQIAGNRYASGPVGKALSDACMGTIASFLSKYQDIIIEHQKVVKGNQKRLESLRELAGKENLEYPSVTLPPQPHTKEGVDAYNEVIARVRMWVNLNLWQKLKLSRDDAKPLLRLKGFPSFPLVERQANEVDWWDMVCNVKKLINEKKEDGKVFWQNLAGYKRQEALRPYLSSEEDRKKGKKFARTQLGDLLLHLEKKHGEDWGKVYDEAWERIDKKVEGLSKHIKLEEERRSEDAQSKAALTDWLRAKASFVIEGLKEADKDEFCRCELKLQKWYGDLRGKPFAIEAENSILDISGFSKQYNCAFIWQKDGVKKLNLYLIINYFKGGKLRFKKIKPEAFEANRFYTVINKKSGEIVPMEVNFNFDDPNLIILPLAFGKRQGREFIWNDLLSLETGSLKLANGRVIEKTLYNRRTRQDEPALFVALTFERREVLDSSNIKPMNLIGVDRGENIPAVIALTDPEGCPLSRFKDSLGNPTHILRIGESYKEKQRTIQAKKEVEQRRAGGYSRKYASKAKNLADDMVRNTARDLLYYAVTQDAMLIFENLSRGFGRQGKRTFMAERQYTRMEDWLTAKLAYEGLPSKTYLSKTLAQYTSKTCSNCGFTITSADYDRVLEKLKKTATGWMTTINGKELKVEGQITYYNRYKRQNVVKDLSVELDRLSEESVNNDISSWTKGRSGEALSLLKKRFSHRPVQEKFVCLNCGFETHADEQAALNIARSWLFLRSQEYKKYQTNKTTGNTDKRAFVETWQSFYRKKLKEVWKPAV

SEQ ID NO: 19896 - protein, 979 aa, synthetic construct
MQEIKRINGIRRRLVKDSNTKKAGKTGPMKTLLVRVMTPDLRERLENLRKKPENIPQPISNTSRANLNKLLTDYTEMKKAILHVYWEEFQKDPVGLMSRVAQPASKKIDQNKLKPEMDEKGNLTTAGFACSQCGQPLFVYKLEQVSEKGKAYTNYFGRCNVAEHEKLILLAQLKPEKDSDEAVTYSLGKFGQRALDFYSIHVTKESTHPVKPLAQIAGNRYASGPVGKALSDACMGTIASFLSKYQDIIIEHQKVVKGNQKRLESLRELAGKENLEYPSVTLPPQPHTKEGVDAYNEVIARVRMWVNLNLWQKLKLSRDDAKPLLRLKGFPSFPLVERQANEVDWWDMVCNVKKLINEKKEDGKVFWQNLAGYKRQEALRPYLSSEEDRKKGKKFARYQLGDLLLHLEKKHGEDWGKVYDEAWERIDKKVEGLSKHIKLEEERRSEDAQSKAALTDWLRAKASFVIEGLKEADKDEFCRCELKLQKWYGDLRGKPFAIEAENSILDISGFSKQYNCAFIWQKDGVKKLNLYLIINYFKGGKLRFKKIKPEAFEANRFYTVINKKSGEIVPMEVNFNFDDPNLIILPLAFGKRQGREFIWNDLLSLETGSLKLANGRVIEKTLYNRRTRQDEPALFVALTFERREVLDSSNIKPMNLIGVDRGENIPAVIALTDPEGCPLSRFKDSLGNPTHILRIGESYKEKQRTIQAKKEVEQRRAGGYSRKYASKAKNLADDMVRNTARDLLYYAVTQDAMLIFENLSRGFGRQGKRTFMAERQYTRMEDWLTAKLAYEGLPSKTYLSKTLAQYTSKTCSNCGFTITSADYDRMLEKLKKTATGWMTTINGKELKVEGQITYYNRYKRQNVVKDLSVELDRLSEESVNNDISSWTKGRSGEALSLLKKRFSHRPVQEKFVCLNCGFETHADEQAALNIARSWLFLRSQEYKKYQTNKTTGNTDKRAFVETWQSFYRKKLKEVWKPAV

SEQ ID NO: 19897 - protein, 979 aa, synthetic construct
MQEIKRINGIRRRLVKDSNTKKAGKTGPMKTLLVRVMTPDLRERLENLRKKPENIPQPISNTSRANLNKLLTDYTEMKKAILHVYWEEFQKDPVGLMSRVAQPASKKIDQNKLKPEMDEKGNLTTAGFACSQCGQPLFVYKLEQVSEKGKAYTNYFGRCNVAEHEKLILLAQLKPEKDSDEAVTYSLGKFGQRALDFYSIHVTKESTHPVKPLAQIAGNRYASGPVGKALSDACMGTIASFLSKYQDIIIEHQKVVKGNQKRLESLRELAGKENLEYPSVTLPPQPHTKEGVDAYNEVIARVRMWVNLNLWQKLKLSRDDAKPLLRLKGFPSFPLVERQANEVDWWDMVCNVKKLINEKKEDGKVFWQNLAGYKRQEALRPYLSSEEDRKKGKKFARYQLGDLLLHLEKKHGEDWGKVYDEAWERIDKKVEGLSKHIKLEEERRSEDAQSKAALTDWLRAKASFVIEGLKEADKDEFCRCELKLQKWYGDLRGKPFAIEAENSILDISGFSKQYNCAFIWQKDGVKKLNLYLIINYFKGGKLRFKKIKPEAFEANRFYTVINKKSGEIVPMEVNFNFDDPNLIILPLAFGKRQGREFIWNDLLSLETGSLKLANGRVIEKTLYNRRTRQDEPALFVALTFERREVLDSSNIKPMNLIGVDRGENIPAVIALTDPEGCPLSRFKDSLGNPTHILRIGESYKEKQRTIQAKKEVEQRRAGGYSRKYASKAKNLADDMVRNTARDLLYYAVTQDAMLIFENLSRGFGRQGKRTFMAERQYTRMEDWLTAKLAYEGLPSKTYLSKTLAQYTSKTCSNCGFTITSADYDRVLEKLKKTATGWMTTINGKELKVEGQITYYNRYKRQNVVKDLSVELDRLSEESVNNDISSWDKGRSGEALSLLKKRFSHRPVQEKFVCLNCGFETHADEQAALNIARSWLFLRSQEYKKYQTNKTTGNTDKRAFVETWQSFYRKKLKEVWKPAV

SEQ ID NO: 19898 - protein, 979 aa, synthetic construct
MQEIKRINGIRRRLVKDSNTKKAGKTGPMKTLLVRVMTPDLRERLENLRKKPENIPQPISNTSRANLNKLLTDYTEMKKAILHVYWEEFQKDPVGLMSRVAQPASKKIDQNKLKPEMDEKGNLTTAGFACSQCGQPLFVYKLEQVSEKGKAYTNYFGRCNVAEHEKLILLAQLKPEKDSDEAVTYSLGKFGQRALDFYSIHVTKESTHPVKPLAQIAGNRYASGPVGKALSDACMGTIASFLSKYQDIIIEHQKVVKGNQKRLESLRELAGKENLEYPSVTLPPQPHTKEGVDAYNEVIARVRMWVNLNLWQKLKLSRDDAKPLLRLKGFPSFPLVERQANEVDWWDMVCNVKKLINEKKEDGKVFWQNLAGYKRQEALRPYLSSEEDRKKGKKFARYQLGDLLLHLEKKHGEDWGKVYDEAWERIDKKVEGLSKHIKLEEERRSEDAQSKAALTDWLRAKASFVIEGLKEADKDEFCRCELKLQKWYGDLRGKPFAIEAENSILDISGFSKQYNCAFIWQKDGVKKLNLYLIINYFKGGKLRFKKIKPEAFEANRFYTVINKKSGEIVPMEVNFNFDDPNLIILPLAFGKRQGREFIWNDLLSLETGSLKLANGRVIEKTLYNRRTRQDEPALFVALTFERREVLDSSNIKPMNLIGVDRGENIPAVIALTDPEGCPLSRFKDSLGNPTHILRIGESYKEKQRTIQAKKEVEQRRAGGYSRKYASKAKNLADDMVRNTARDLLYYAVTQDAMLIFENLSRGFGRQGKRTFMAERQYTRMEDWLTAKLAYEGLPSKTYLSKTLAQYTSKTCSNCGFTITSADYDRVLEKLKKTATGWMTTINGKELKVEGQITYYNRYKRQNVVKDLSVELDRLSEESVNNDISSWTKGRQGEALSLLKKRFSHRPVQEKFVCLNCGFETHADEQAALNIARSWLFLRSQEYKKYQTNKTTGNTDKRAFVETWQSFYRKKLKEVWKPAV

SEQ ID NO: 19899 - protein, 980 aa, synthetic construct
MQEIKRINKIRRRLVKDSNTKKAGKTRGPMKTLLVRVMTPDLRERLENLRKKPENIPQPISNTSQANLNKLLTDYTEMKKAILHVYWEEFQKDPVGLMSRVAQPASKKIDQNKLKPEMDEKGNLTTAGFACSQCGQPLFVYKLEQVSEKGKAYTNYFGRCNVAEHEKLILLAQLKPEKDSDEAVTYSLGKFGQRALDFYSIHVTKESTHPVKPLAQIAGNRYASGPVGKALSDACMGTIASFLSKYQDIIIEHQKVVKGNQKRLESLRELAGKENLEYPSVTLPPQPHTKEGVDAYNEVIARVRMWVNLNLWQKLKLSRDDAKPLLRLKGFPSFPLVERQANEVDWWDMVCNVKKLINEKKEDGKVFWQNLAGYKRQEALRPYLSSEEDRKKGKKFARYQLGDLLLHLEKKHGEDWGKVYDEAWERIDKKVEGLSKHIKLEEERRSEDAQSKAALTDWLRAKASFVIEGLKEADKDEFCRCELKLQKWYGDLRGKPFAIEAENSILDISGFSKQYNCAFIWQKDGVKKLNLYLIINYFKGGKLRFKKIKPEAFEANRFYTVINKKSGEIVPMEVNFNFDDPNLIILPLAFGKRQGREFIWNDLLSLETGSLKLANGRVIEKTLYNRRTRQDEPALFVALTFERREVLDSSNIKPMNLIGVDRGENIPAVIALTDPEGCPLSRFKDSLGNPTHILRIGESYKEKQRTIQAKKEVEQRRAGGYSRKYASKAKNLADDMVRNTARDLLYYAVTQDAMLIFENLSRGFGRQGKRTFMAERQYTRMEDWLTAKLAYEGLPSKTYLSKTLAQYTSKTCSNCGFTITSADYDRVLEKLKKTATGWMTTINGKELKVEGQITYYNRYKRQNVVKDLSVELDRLSEESVNNDISSWTKGRSGEALSLLKKRFSHRPVQEKFVCLNCGFETHADEQAALNIARSWLFLRSQEYKKYQTNKTTGNTDKRAFVETWQSFYRKKLKEVWKPAV

SEQ ID NO: 19900 - protein, 980 aa, synthetic construct
MQEIKRINKIRRRLVKDSNTKKAGKTRGPMKTLLVRVMTPDLRERLENLRKKPENIPQPISNTSRANLNKLLTDYTEMKKAILHVYWEEFQKDPVGLMSRVAQPASKKIDQNKLKPEMDEKGNLTTAGFACSQCGQPLFVYKLEQVSEKGKAYTNYFGRCNVAEHEKLIKLAQLKPEKDSDEAVTYSLGKFGQRALDFYSIHVTKESTHPVKPLAQIAGNRYASGPVGKALSDACMGTIASFLSKYQDIIIEHQKVVKGNQKRLESLRELAGKENLEYPSVTLPPQPHTKEGVDAYNEVIARVRMWVNLNLWQKLKLSRDDAKPLLRLKGFPSFPLVERQANEVDWWDMVCNVKKLINEKKEDGKVFWQNLAGYKRQEALRPYLSSEEDRKKGKKFARYQLGDLLLHLEKKHGEDWGKVYDEAWERIDKKVEGLSKHIKLEEERRSEDAQSKAALTDWLRAKASFVIEGLKEADKDEFCRCELKLQKWYGDLRGKPFAIEAENSILDISGFSKQYNCAFIWQKDGVKKLNLYLIINYFKGGKLRFKKIKPEAFEANRFYTVINKKSGEIVPMEVNFNFDDPNLIILPLAFGKRQGREFIWNDLLSLETGSLKLANGRVIEKTLYNRRTRQDEPALFVALTFERREVLDSSNIKPMNLIGVDRGENIPAVIALTDPEGCPLSRFKDSLGNPTHILRIGESYKEKQRTIQAKKEVEQRRAGGYSRKYASKAKNLADDMVRNTARDLLYYAVTQDAMLIFENLSRGFGRQGKRTFMAERQYTRMEDWLTAKLAYEGLPSKTYLSKTLAQYTSKTCSNCGFTITSADYDRVLEKLKKTATGWMTTINGKELKVEGQITYYNRYKRQNVVKDLSVELDRLSEESVNNDISSWTKGRSGEALSLLKKRFSHRPVQEKFVCLNCGFETHADEQAALNIARSWLFLRSQEYKKYQTNKTTGNTDKRAFVETWQSFYRKKLKEVWKPAV

SEQ ID NO: 19901 - protein, 980 aa, synthetic construct
MQEIKRINKIRRRLVKDSNTKKAGKTRGPMKTLLVRVMTPDLRERLENLRKKPENIPQPISNTSRANLNKLLTDYTEMKKAILHVYWEEFQKDPVGLMSRVAQPASKKIDQNKLKPEMDEKGNLTTAGFACSQCGQPLFVYKLEQVSEKGKAYTNYFGRCNVAEHEKLIQLAQLKPEKDSDEAVTYSLGKFGQRALDFYSIHVTKESTHPVKPLAQIAGNRYASGPVGKALSDACMGTIASFLSKYQDIIIEHQKVVKGNQKRLESLRELAGKENLEYPSVTLPPQPHTKEGVDAYNEVIARVRMWVNLNLWQKLKLSRDDAKPLLRLKGFPSFPLVERQANEVDWWDMVCNVKKLINEKKEDGKVFWQNLAGYKRQEALRPYLSSEEDRKKGKKFARYQLGDLLLHLEKKHGEDWGKVYDEAWERIDKKVEGLSKHIKLEEERRSEDAQSKAALTDWLRAKASFVIEGLKEADKDEFCRCELKLQKWYGDLRGKPFAIEAENSILDISGFSKQYNCAFIWQKDGVKKLNLYLIINYFKGGKLRFKKIKPEAFEANRFYTVINKKSGEIVPMEVNFNFDDPNLIILPLAFGKRQGREFIWNDLLSLETGSLKLANGRVIEKTLYNRRTRQDEPALFVALTFERREVLDSSNIKPMNLIGVDRGENIPAVIALTDPEGCPLSRFKDSLGNPTHILRIGESYKEKQRTIQAKKEVEQRRAGGYSRKYASKAKNLADDMVRNTARDLLYYAVTQDAMLIFENLSRGFGRQGKRTFMAERQYTRMEDWLTAKLAYEGLPSKTYLSKTLAQYTSKTCSNCGFTITSADYDRVLEKLKKTATGWMTTINGKELKVEGQITYYNRYKRQNVVKDLSVELDRLSEESVNNDISSWTKGRSGEALSLLKKRFSHRPVQEKFVCLNCGFETHADEQAALNIARSWLFLRSQEYKKYQTNKTTGNTDKRAFVETWQSFYRKKLKEVWKPAV

SEQ ID NO: 19902 - protein, 980 aa, synthetic construct
MQEIKRINKIRRRLVKDSNTKKAGKTRGPMKTLLVRVMTPDLRERLENLRKKPENIPQPISNTSRANLNKLLTDYTEMKKAILHVYWEEFQKDPVGLMSRVAQPASKKIDQNKLKPEMDEKGNLTTAGFACSQCGQPLFVYKLEQVSEKGKAYTNYFGRCNVAEHEKLILLDQLKPEKDSDEAVTYSLGKFGQRALDFYSIHVTKESTHPVKPLAQIAGNRYASGPVGKALSDACMGTIASFLSKYQDIIIEHQKVVKGNQKRLESLRELAGKENLEYPSVTLPPQPHTKEGVDAYNEVIARVRMWVNLNLWQKLKLSRDDAKPLLRLKGFPSFPLVERQANEVDWWDMVCNVKKLINEKKEDGKVFWQNLAGYKRQEALRPYLSSEEDRKKGKKFARYQLGDLLLHLEKKHGEDWGKVYDEAWERIDKKVEGLSKHIKLEEERRSEDAQSKAALTDWLRAKASFVIEGLKEADKDEFCRCELKLQKWYGDLRGKPFAIEAENSILDISGFSKQYNCAFIWQKDGVKKLNLYLIINYFKGGKLRFKKIKPEAFEANRFYTVINKKSGEIVPMEVNFNFDDPNLIILPLAFGKRQGREFIWNDLLSLETGSLKLANGRVIEKTLYNRRTRQDEPALFVALTFERREVLDSSNIKPMNLIGVDRGENIPAVIALTDPEGCPLSRFKDSLGNPTHILRIGESYKEKQRTIQAKKEVEQRRAGGYSRKYASKAKNLADDMVRNTARDLLYYAVTQDAMLIFENLSRGFGRQGKRTFMAERQYTRMEDWLTAKLAYEGLPSKTYLSKTLAQYTSKTCSNCGFTITSADYDRVLEKLKKTATGWMTTINGKELKVEGQITYYNRYKRQNVVKDLSVELDRLSEESVNNDISSWTKGRSGEALSLLKKRFSHRPVQEKFVCLNCGFETHADEQAALNIARSWLFLRSQEYKKYQTNKTTGNTDKRAFVETWQSFYRKKLKEVWKPAV

SEQ ID NO: 19903 - protein, 980 aa, synthetic construct
MQEIKRINKIRRRLVKDSNTKKAGKTRGPMKTLLVRVMTPDLRERLENLRKKPENIPQPISNTSRANLNKLLTDYTEMKKAILHVYWEEFQKDPVGLMSRVAQPASKKIDQNKLKPEMDEKGNLTTAGFACSQCGQPLFVYKLEQVSEKGKAYTNYFGRCNVAEHEKLILLYQLKPEKDSDEAVTYSLGKFGQRALDFYSIHVTKESTHPVKPLAQIAGNRYASGPVGKALSDACMGTIASFLSKYQDIIIEHQKVVKGNQKRLESLRELAGKENLEYPSVTLPPQPHTKEGVDAYNEVIARVRMWVNLNLWQKLKLSRDDAKPLLRLKGFPSFPLVERQANEVDWWDMVCNVKKLINEKKEDGKVFWQNLAGYKRQEALRPYLSSEEDRKKGKKFARYQLGDLLLHLEKKHGEDWGKVYDEAWERIDKKVEGLSKHIKLEEERRSEDAQSKAALTDWLRAKASFVIEGLKEADKDEFCRCELKLQKWYGDLRGKPFAIEAENSILDISGFSKQYNCAFIWQKDGVKKLNLYLIINYFKGGKLRFKKIKPEAFEANRFYTVINKKSGEIVPMEVNFNFDDPNLIILPLAFGKRQGREFIWNDLLSLETGSLKLANGRVIEKTLYNRRTRQDEPALFVALTFERREVLDSSNIKPMNLIGVDRGENIPAVIALTDPEGCPLSRFKDSLGNPTHILRIGESYKEKQRTIQAKKEVEQRRAGGYSRKYASKAKNLADDMVRNTARDLLYYAVTQDAMLIFENLSRGFGRQGKRTFMAERQYTRMEDWLTAKLAYEGLPSKTYLSKTLAQYTSKTCSNCGFTITSADYDRVLEKLKKTATGWMTTINGKELKVEGQITYYNRYKRQNVVKDLSVELDRLSEESVNNDISSWTKGRSGEALSLLKKRFSHRPVQEKFVCLNCGFETHADEQAALNIARSWLFLRSQEYKKYQTNKTTGNTDKRAFVETWQSFYRKKLKEVWKPAV

SEQ ID NO: 19904 - protein, 980 aa, synthetic construct
MQEIKRINKIRRRLVKDSNTKKAGKTRGPMKTLLVRVMTPDLRERLENLRKKPENIPQPISNTSRANLNKLLTDYTEMKKAILHVYWEEFQKDPVGLMSRVAQPASKKIDQNKLKPEMDEKGNLTTAGFACSQCGQPLFVYKLEQVSEKGKAYTNYFGRCNVAEHEKLILLSQLKPEKDSDEAVTYSLGKFGQRALDFYSIHVTKESTHPVKPLAQIAGNRYASGPVGKALSDACMGTIASFLSKYQDIIIEHQKVVKGNQKRLESLRELAGKENLEYPSVTLPPQPHTKEGVDAYNEVIARVRMWVNLNLWQKLKLSRDDAKPLLRLKGFPSFPLVERQANEVDWWDMVCNVKKLINEKKEDGKVFWQNLAGYKRQEALRPYLSSEEDRKKGKKFARYQLGDLLLHLEKKHGEDWGKVYDEAWERIDKKVEGLSKHIKLEEERRSEDAQSKAALTDWLRAKASFVIEGLKEADKDEFCRCELKLQKWYGDLRGKPFAIEAENSILDISGFSKQYNCAFIWQKDGVKKLNLYLIINYFKGGKLRFKKIKPEAFEANRFYTVINKKSGEIVPMEVNFNFDDPNLIILPLAFGKRQGREFIWNDLLSLETGSLKLANGRVIEKTLYNRRTRQDEPALFVALTFERREVLDSSNIKPMNLIGVDRGENIPAVIALTDPEGCPLSRFKDSLGNPTHILRIGESYKEKQRTIQAKKEVEQRRAGGYSRKYASKAKNLADDMVRNTARDLLYYAVTQDAMLIFENLSRGFGRQGKRTFMAERQYTRMEDWLTAKLAYEGLPSKTYLSKTLAQYTSKTCSNCGFTITSADYDRVLEKLKKTATGWMTTINGKELKVEGQITYYNRYKRQNVVKDLSVELDRLSEESVNNDISSWTKGRSGEALSLLKKRFSHRPVQEKFVCLNCGFETHADEQAALNIARSWLFLRSQEYKKYQTNKTTGNTDKRAFVETWQSFYRKKLKEVWKPAV

SEQ ID NO: 19905 - protein, 980 aa, synthetic construct
MQEIKRINKIRRRLVKDSNTKKAGKTRGPMKTLLVRVMTPDLRERLENLRKKPENIPQPISNTSRANLNKLLTDYTEMKKAILHVYWEEFQKDPVGLMSRVAQPASKKIDQNKLKPEMDEKGNLTTAGFACSQCGQPLFVYKLEQVSEKGKAYTNYFGRCNVAEHEKLILLAQLKPEKDSDEAVTYSLGKFGQRALDFYSIHVTKESTHPVKPLAQIAGNRYASTPVGKALSDACMGTIASFLSKYQDIIIEHQKVVKGNQKRLESLRELAGKENLEYPSVTLPPQPHTKEGVDAYNEVIARVRMWVNLNLWQKLKLSRDDAKPLLRLKGFPSFPLVERQANEVDWWDMVCNVKKLINEKKEDGKVFWQNLAGYKRQEALRPYLSSEEDRKKGKKFARYQLGDLLLHLEKKHGEDWGKVYDEAWERIDKKVEGLSKHIKLEEERRSEDAQSKAALTDWLRAKASFVIEGLKEADKDEFCRCELKLQKWYGDLRGKPFAIEAENSILDISGFSKQYNCAFIWQKDGVKKLNLYLIINYFKGGKLRFKKIKPEAFEANRFYTVINKKSGEIVPMEVNFNFDDPNLIILPLAFGKRQGREFIWNDLLSLETGSLKLANGRVIEKTLYNRRTRQDEPALFVALTFERREVLDSSNIKPMNLIGVDRGENIPAVIALTDPEGCPLSRFKDSLGNPTHILRIGESYKEKQRTIQAKKEVEQRRAGGYSRKYASKAKNLADDMVRNTARDLLYYAVTQDAMLIFENLSRGFGRQGKRTFMAERQYTRMEDWLTAKLAYEGLPSKTYLSKTLAQYTSKTCSNCGFTITSADYDRVLEKLKKTATGWMTTINGKELKVEGQITYYNRYKRQNVVKDLSVELDRLSEESVNNDISSWTKGRSGEALSLLKKRFSHRPVQEKFVCLNCGFETHADEQAALNIARSWLFLRSQEYKKYQTNKTTGNTDKRAFVETWQSFYRKKLKEVWKPAV

SEQ ID NO: 19906 - protein, 980 aa, synthetic construct
MQEIKRINKIRRRLVKDSNTKKAGKTRGPMKTLLVRVMTPDLRERLENLRKKPENIPQPISNTSRANLNKLLTDYTEMKKAILHVYWEEFQKDPVGLMSRVAQPASKKIDQNKLKPEMDEKGNLTTAGFACSQCGQPLFVYKLEQVSEKGKAYTNYFGRCNVAEHEKLILLAQLKPEKDSDEAVTYSLGKFGQRALDFYSIHVTKESTHPVKPLAQIAGNRYASGPVGKALSDACMGTIASFLSKYQDIIIEHQKVVKGNQKRLESLRELAGKENLEYPSVTLPPQPHTKEGVDAYNEVIARVRTWVNLNLWQKLKLSRDDAKPLLRLKGFPSFPLVERQANEVDWWDMVCNVKKLINEKKEDGKVFWQNLAGYKRQEALRPYLSSEEDRKKGKKFARYQLGDLLLHLEKKHGEDWGKVYDEAWERIDKKVEGLSKHIKLEEERRSEDAQSKAALTDWLRAKASFVIEGLKEADKDEFCRCELKLQKWYGDLRGKPFAIEAENSILDISGFSKQYNCAFIWQKDGVKKLNLYLIINYFKGGKLRFKKIKPEAFEANRFYTVINKKSGEIVPMEVNFNFDDPNLIILPLAFGKRQGREFIWNDLLSLETGSLKLANGRVIEKTLYNRRTRQDEPALFVALTFERREVLDSSNIKPMNLIGVDRGENIPAVIALTDPEGCPLSRFKDSLGNPTHILRIGESYKEKQRTIQAKKEVEQRRAGGYSRKYASKAKNLADDMVRNTARDLLYYAVTQDAMLIFENLSRGFGRQGKRTFMAERQYTRMEDWLTAKLAYEGLPSKTYLSKTLAQYTSKTCSNCGFTITSADYDRVLEKLKKTATGWMTTINGKELKVEGQITYYNRYKRQNVVKDLSVELDRLSEESVNNDISSWTKGRSGEALSLLKKRFSHRPVQEKFVCLNCGFETHADEQAALNIARSWLFLRSQEYKKYQTNKTTGNTDKRAFVETWQSFYRKKLKEVWKPAV

SEQ ID NO: 19907 - protein, 980 aa, synthetic construct
MQEIKRINKIRRRLVKDSNTKKAGKTRGPMKTLLVRVMTPDLRERLENLRKKPENIPQPISNTSRANLNKLLTDYTEMKKAILHVYWEEFQKDPVGLMSRVAQPASKKIDQNKLKPEMDEKGNLTTAGFACSQCGQPLFVYKLEQVSEKGKAYTNYFGRCNVAEHEKLILLAQLKPEKDSDEAVTYSLGKFGQRALDFYSIHVTKESTHPVKPLAQIAGNRYASGPVGKALSDACMGTIASFLSKYQDIIIEHQKVVKGNQKRLESLRELAGKENLEYPSVTLPPQPHTKEGVDAYNEVIARVRMWVNLNLWQKLKLSRDDAKPLLRLKGFPSFPLVERQANEVDWWDMVCNVKKLINEKKEDGKVFWQNLAGYKRQEALRPYLSSEEDRKKGKKFARTQLGDLLLHLEKKHGEDWGKVYDEAWERIDKKVEGLSKHIKLEEERRSEDAQSKAALTDWLRAKASFVIEGLKEADKDEFCRCELKLQKWYGDLRGKPFAIEAENSILDISGFSKQYNCAFIWQKDGVKKLNLYLIINYFKGGKLRFKKIKPEAFEANRFYTVINKKSGEIVPMEVNFNFDDPNLIILPLAFGKRQGREFIWNDLLSLETGSLKLANGRVIEKTLYNRRTRQDEPALFVALTFERREVLDSSNIKPMNLIGVDRGENIPAVIALTDPEGCPLSRFKDSLGNPTHILRIGESYKEKQRTIQAKKEVEQRRAGGYSRKYASKAKNLADDMVRNTARDLLYYAVTQDAMLIFENLSRGFGRQGKRTFMAERQYTRMEDWLTAKLAYEGLPSKTYLSKTLAQYTSKTCSNCGFTITSADYDRVLEKLKKTATGWMTTINGKELKVEGQITYYNRYKRQNVVKDLSVELDRLSEESVNNDISSWTKGRSGEALSLLKKRFSHRPVQEKFVCLNCGFETHADEQAALNIARSWLFLRSQEYKKYQTNKTTGNTDKRAFVETWQSFYRKKLKEVWKPAV

SEQ ID NO: 19908 - protein, 980 aa, synthetic construct
MQEIKRINKIRRRLVKDSNTKKAGKTRGPMKTLLVRVMTPDLRERLENLRKKPENIPQPISNTSRANLNKLLTDYTEMKKAILHVYWEEFQKDPVGLMSRVAQPASKKIDQNKLKPEMDEKGNLTTAGFACSQCGQPLFVYKLEQVSEKGKAYTNYFGRCNVAEHEKLILLAQLKPEKDSDEAVTYSLGKFGQRALDFYSIHVTKESTHPVKPLAQIAGNRYASGPVGKALSDACMGTIASFLSKYQDIIIEHQKVVKGNQKRLESLRELAGKENLEYPSVTLPPQPHTKEGVDAYNEVIARVRMWVNLNLWQKLKLSRDDAKPLLRLKGFPSFPLVERQANEVDWWDMVCNVKKLINEKKEDGKVFWQNLAGYKRQEALRPYLSSEEDRKKGKKFARYQLGDLLLHLEKKHGEDWGKVYDEAWERIDKKVEGLSKHIKLEEERRSEDAQSKAALTDWLRAKASFVIEGLKEADKDEFCRCELKLQKWYGDLRGKPFAIEAENSILDISGFSKQYNCAFIWQKDGVKKLNLYLIINYFKGGKLRFKKIKPEAFEANRFYTVINKKSGEIVPMEVNFNFDDPNLIILPLAFGKRQGREFIWNDLLSLETGSLKLANGRVIEKTLYNRRTRQDEPALFVALTFERREVLDSSNIKPMNLIGVDRGENIPAVIALTDPEGCPLSRFKDSLGNPTHILRIGESYKEKQRTIQAKKEVEQRRAGGYSRKYASKAKNLADDMVRNTARDLLYYAVTQDAMLIFENLSRGFGRQGKRTFMAERQYTRMEDWLTAKLAYEGLPSKTYLSKTLAQYTSKTCSNCGFTITSADYDRMLEKLKKTATGWMTTINGKELKVEGQITYYNRYKRQNVVKDLSVELDRLSEESVNNDISSWTKGRSGEALSLLKKRFSHRPVQEKFVCLNCGFETHADEQAALNIARSWLFLRSQEYKKYQTNKTTGNTDKRAFVETWQSFYRKKLKEVWKPAV

SEQ ID NO: 19909 - protein, 980 aa, synthetic construct
MQEIKRINKIRRRLVKDSNTKKAGKTRGPMKTLLVRVMTPDLRERLENLRKKPENIPQPISNTSRANLNKLLTDYTEMKKAILHVYWEEFQKDPVGLMSRVAQPASKKIDQNKLKPEMDEKGNLTTAGFACSQCGQPLFVYKLEQVSEKGKAYTNYFGRCNVAEHEKLILLAQLKPEKDSDEAVTYSLGKFGQRALDFYSIHVTKESTHPVKPLAQIAGNRYASGPVGKALSDACMGTIASFLSKYQDIIIEHQKVVKGNQKRLESLRELAGKENLEYPSVTLPPQPHTKEGVDAYNEVIARVRMWVNLNLWQKLKLSRDDAKPLLRLKGFPSFPLVERQANEVDWWDMVCNVKKLINEKKEDGKVFWQNLAGYKRQEALRPYLSSEEDRKKGKKFARYQLGDLLLHLEKKHGEDWGKVYDEAWERIDKKVEGLSKHIKLEEERRSEDAQSKAALTDWLRAKASFVIEGLKEADKDEFCRCELKLQKWYGDLRGKPFAIEAENSILDISGFSKQYNCAFIWQKDGVKKLNLYLIINYFKGGKLRFKKIKPEAFEANRFYTVINKKSGEIVPMEVNFNFDDPNLIILPLAFGKRQGREFIWNDLLSLETGSLKLANGRVIEKTLYNRRTRQDEPALFVALTFERREVLDSSNIKPMNLIGVDRGENIPAVIALTDPEGCPLSRFKDSLGNPTHILRIGESYKEKQRTIQAKKEVEQRRAGGYSRKYASKAKNLADDMVRNTARDLLYYAVTQDAMLIFENLSRGFGRQGKRTFMAERQYTRMEDWLTAKLAYEGLPSKTYLSKTLAQYTSKTCSNCGFTITSADYDRVLEKLKKTATGWMTTINGKELKVEGQITYYNRYKRQNVVKDLSVELDRLSEESVNNDISSWDKGRSGEALSLLKKRFSHRPVQEKFVCLNCGFETHADEQAALNIARSWLFLRSQEYKKYQTNKTTGNTDKRAFVETWQSFYRKKLKEVWKPAV

SEQ ID NO: 19910 - protein, 980 aa, synthetic construct
MQEIKRINKIRRRLVKDSNTKKAGKTRGPMKTLLVRVMTPDLRERLENLRKKPENIPQPISNTSRANLNKLLTDYTEMKKAILHVYWEEFQKDPVGLMSRVAQPASKKIDQNKLKPEMDEKGNLTTAGFACSQCGQPLFVYKLEQVSEKGKAYTNYFGRCNVAEHEKLILLAQLKPEKDSDEAVTYSLGKFGQRALDFYSIHVTKESTHPVKPLAQIAGNRYASGPVGKALSDACMGTIASFLSKYQDIIIEHQKVVKGNQKRLESLRELAGKENLEYPSVTLPPQPHTKEGVDAYNEVIARVRMWVNLNLWQKLKLSRDDAKPLLRLKGFPSFPLVERQANEVDWWDMVCNVKKLINEKKEDGKVFWQNLAGYKRQEALRPYLSSEEDRKKGKKFARYQLGDLLLHLEKKHGEDWGKVYDEAWERIDKKVEGLSKHIKLEEERRSEDAQSKAALTDWLRAKASFVIEGLKEADKDEFCRCELKLQKWYGDLRGKPFAIEAENSILDISGFSKQYNCAFIWQKDGVKKLNLYLIINYFKGGKLRFKKIKPEAFEANRFYTVINKKSGEIVPMEVNFNFDDPNLIILPLAFGKRQGREFIWNDLLSLETGSLKLANGRVIEKTLYNRRTRQDEPALFVALTFERREVLDSSNIKPMNLIGVDRGENIPAVIALTDPEGCPLSRFKDSLGNPTHILRIGESYKEKQRTIQAKKEVEQRRAGGYSRKYASKAKNLADDMVRNTARDLLYYAVTQDAMLIFENLSRGFGRQGKRTFMAERQYTRMEDWLTAKLAYEGLPSKTYLSKTLAQYTSKTCSNCGFTITSADYDRVLEKLKKTATGWMTTINGKELKVEGQITYYNRYKRQNVVKDLSVELDRLSEESVNNDISSWTKGRQGEALSLLKKRFSHRPVQEKFVCLNCGFETHADEQAALNIARSWLFLRSQEYKKYQTNKTTGNTDKRAFVETWQSFYRKKLKEVWKPAV

SEQ ID NO: 19911 - protein, 979 aa, synthetic construct
MQEIKRINKIRRRLVKDSNTKKAGKTGPMKTLLVPVMTPDLRERLENLRKKPENIPQPISNTSQANLNKLLTDYTEMKKAILHVYWEEFQKDPVGLMSRVAQPASKKIDQNKLKPEMDEKGNLTTAGFACSQCGQPLFVYKLEQVSEKGKAYTNYFGRCNVAEHEKLILLAQLKPEKDSDEAVTYSLGKFGQRALDFYSIHVTKESTHPVKPLAQIAGNRYASGPVGKALSDACMGTIASFLSKYQDIIIEHQKVVKGNQKRLESLRELAGKENLEYPSVTLPPQPHTKEGVDAYNEVIARVRMWVNLNLWQKLKLSRDDAKPLLRLKGFPSFPLVERQANEVDWWDMVCNVKKLINEKKEDGKVFWQNLAGYKRQEALRPYLSSEEDRKKGKKFARYQLGDLLLHLEKKHGEDWGKVYDEAWERIDKKVEGLSKHIKLEEERRSEDAQSKAALTDWLRAKASFVIEGLKEADKDEFCRCELKLQKWYGDLRGKPFAIEAENSILDISGFSKQYNCAFIWQKDGVKKLNLYLIINYFKGGKLRFKKIKPEAFEANRFYTVINKKSGEIVPMEVNFNFDDPNLIILPLAFGKRQGREFIWNDLLSLETGSLKLANGRVIEKTLYNRRTRQDEPALFVALTFERREVLDSSNIKPMNLIGVDRGENIPAVIALTDPEGCPLSRFKDSLGNPTHILRIGESYKEKQRTIQAKKEVEQRRAGGYSRKYASKAKNLADDMVRNTARDLLYYAVTQDAMLIFENLSRGFGRQGKRTFMAERQYTRMEDWLTAKLAYEGLPSKTYLSKTLAQYTSKTCSNCGFTITSADYDRVLEKLKKTATGWMTTINGKELKVEGQITYYNRYKRQNVVKDLSVELDRLSEESVNNDISSWTKGRSGEALSLLKKRFSHRPVQEKFVCLNCGFETHADEQAALNIARSWLFLRSQEYKKYQTNKTTGNTDKRAFVETWQSFYRKKLKEVWKPAV

SEQ ID NO: 19912 - protein, 979 aa, synthetic construct
MQEIKRINKIRRRLVKDSNTKKAGKTGPMKTLLVPVMTPDLRERLENLRKKPENIPQPISNTSRANLNKLLTDYTEMKKAILHVYWEEFQKDPVGLMSRVAQPASKKIDQNKLKPEMDEKGNLTTAGFACSQCGQPLFVYKLEQVSEKGKAYTNYFGRCNVAEHEKLIKLAQLKPEKDSDEAVTYSLGKFGQRALDFYSIHVTKESTHPVKPLAQIAGNRYASGPVGKALSDACMGTIASFLSKYQDIIIEHQKVVKGNQKRLESLRELAGKENLEYPSVTLPPQPHTKEGVDAYNEVIARVRMWVNLNLWQKLKLSRDDAKPLLRLKGFPSFPLVERQANEVDWWDMVCNVKKLINEKKEDGKVFWQNLAGYKRQEALRPYLSSEEDRKKGKKFARYQLGDLLLHLEKKHGEDWGKVYDEAWERIDKKVEGLSKHIKLEEERRSEDAQSKAALTDWLRAKASFVIEGLKEADKDEFCRCELKLQKWYGDLRGKPFAIEAENSILDISGFSKQYNCAFIWQKDGVKKLNLYLIINYFKGGKLRFKKIKPEAFEANRFYTVINKKSGEIVPMEVNFNFDDPNLIILPLAFGKRQGREFIWNDLLSLETGSLKLANGRVIEKTLYNRRTRQDEPALFVALTFERREVLDSSNIKPMNLIGVDRGENIPAVIALTDPEGCPLSRFKDSLGNPTHILRIGESYKEKQRTIQAKKEVEQRRAGGYSRKYASKAKNLADDMVRNTARDLLYYAVTQDAMLIFENLSRGFGRQGKRTFMAERQYTRMEDWLTAKLAYEGLPSKTYLSKTLAQYTSKTCSNCGFTITSADYDRVLEKLKKTATGWMTTINGKELKVEGQITYYNRYKRQNVVKDLSVELDRLSEESVNNDISSWTKGRSGEALSLLKKRFSHRPVQEKFVCLNCGFETHADEQAALNIARSWLFLRSQEYKKYQTNKTTGNTDKRAFVETWQSFYRKKLKEVWKPAV

SEQ ID NO: 19913 - protein, 979 aa, synthetic construct
MQEIKRINKIRRRLVKDSNTKKAGKTGPMKTLLVPVMTPDLRERLENLRKKPENIPQPISNTSRANLNKLLTDYTEMKKAILHVYWEEFQKDPVGLMSRVAQPASKKIDQNKLKPEMDEKGNLTTAGFACSQCGQPLFVYKLEQVSEKGKAYTNYFGRCNVAEHEKLIQLAQLKPEKDSDEAVTYSLGKFGQRALDFYSIHVTKESTHPVKPLAQIAGNRYASGPVGKALSDACMGTIASFLSKYQDIIIEHQKVVKGNQKRLESLRELAGKENLEYPSVTLPPQPHTKEGVDAYNEVIARVRMWVNLNLWQKLKLSRDDAKPLLRLKGFPSFPLVERQANEVDWWDMVCNVKKLINEKKEDGKVFWQNLAGYKRQEALRPYLSSEEDRKKGKKFARYQLGDLLLHLEKKHGEDWGKVYDEAWERIDKKVEGLSKHIKLEEERRSEDAQSKAALTDWLRAKASFVIEGLKEADKDEFCRCELKLQKWYGDLRGKPFAIEAENSILDISGFSKQYNCAFIWQKDGVKKLNLYLIINYFKGGKLRFKKIKPEAFEANRFYTVINKKSGEIVPMEVNFNFDDPNLIILPLAFGKRQGREFIWNDLLSLETGSLKLANGRVIEKTLYNRRTRQDEPALFVALTFERREVLDSSNIKPMNLIGVDRGENIPAVIALTDPEGCPLSRFKDSLGNPTHILRIGESYKEKQRTIQAKKEVEQRRAGGYSRKYASKAKNLADDMVRNTARDLLYYAVTQDAMLIFENLSRGFGRQGKRTFMAERQYTRMEDWLTAKLAYEGLPSKTYLSKTLAQYTSKTCSNCGFTITSADYDRVLEKLKKTATGWMTTINGKELKVEGQITYYNRYKRQNVVKDLSVELDRLSEESVNNDISSWTKGRSGEALSLLKKRFSHRPVQEKFVCLNCGFETHADEQAALNIARSWLFLRSQEYKKYQTNKTTGNTDKRAFVETWQSFYRKKLKEVWKPAV

SEQ ID NO: 19914 - protein, 979 aa, synthetic construct
MQEIKRINKIRRRLVKDSNTKKAGKTGPMKTLLVPVMTPDLRERLENLRKKPENIPQPISNTSRANLNKLLTDYTEMKKAILHVYWEEFQKDPVGLMSRVAQPASKKIDQNKLKPEMDEKGNLTTAGFACSQCGQPLFVYKLEQVSEKGKAYTNYFGRCNVAEHEKLILLDQLKPEKDSDEAVTYSLGKFGQRALDFYSIHVTKESTHPVKPLAQIAGNRYASGPVGKALSDACMGTIASFLSKYQDIIIEHQKVVKGNQKRLESLRELAGKENLEYPSVTLPPQPHTKEGVDAYNEVIARVRMWVNLNLWQKLKLSRDDAKPLLRLKGFPSFPLVERQANEVDWWDMVCNVKKLINEKKEDGKVFWQNLAGYKRQEALRPYLSSEEDRKKGKKFARYQLGDLLLHLEKKHGEDWGKVYDEAWERIDKKVEGLSKHIKLEEERRSEDAQSKAALTDWLRAKASFVIEGLKEADKDEFCRCELKLQKWYGDLRGKPFAIEAENSILDISGFSKQYNCAFIWQKDGVKKLNLYLIINYFKGGKLRFKKIKPEAFEANRFYTVINKKSGEIVPMEVNFNFDDPNLIILPLAFGKRQGREFIWNDLLSLETGSLKLANGRVIEKTLYNRRTRQDEPALFVALTFERREVLDSSNIKPMNLIGVDRGENIPAVIALTDPEGCPLSRFKDSLGNPTHILRIGESYKEKQRTIQAKKEVEQRRAGGYSRKYASKAKNLADDMVRNTARDLLYYAVTQDAMLIFENLSRGFGRQGKRTFMAERQYTRMEDWLTAKLAYEGLPSKTYLSKTLAQYTSKTCSNCGFTITSADYDRVLEKLKKTATGWMTTINGKELKVEGQITYYNRYKRQNVVKDLSVELDRLSEESVNNDISSWTKGRSGEALSLLKKRFSHRPVQEKFVCLNCGFETHADEQAALNIARSWLFLRSQEYKKYQTNKTTGNTDKRAFVETWQSFYRKKLKEVWKPAV

SEQ ID NO: 19915 - protein, 979 aa, synthetic construct
MQEIKRINKIRRRLVKDSNTKKAGKTGPMKTLLVPVMTPDLRERLENLRKKPENIPQPISNTSRANLNKLLTDYTEMKKAILHVYWEEFQKDPVGLMSRVAQPASKKIDQNKLKPEMDEKGNLTTAGFACSQCGQPLFVYKLEQVSEKGKAYTNYFGRCNVAEHEKLILLYQLKPEKDSDEAVTYSLGKFGQRALDFYSIHVTKESTHPVKPLAQIAGNRYASGPVGKALSDACMGTIASFLSKYQDIIIEHQKVVKGNQKRLESLRELAGKENLEYPSVTLPPQPHTKEGVDAYNEVIARVRMWVNLNLWQKLKLSRDDAKPLLRLKGFPSFPLVERQANEVDWWDMVCNVKKLINEKKEDGKVFWQNLAGYKRQEALRPYLSSEEDRKKGKKFARYQLGDLLLHLEKKHGEDWGKVYDEAWERIDKKVEGLSKHIKLEEERRSEDAQSKAALTDWLRAKASFVIEGLKEADKDEFCRCELKLQKWYGDLRGKPFAIEAENSILDISGFSKQYNCAFIWQKDGVKKLNLYLIINYFKGGKLRFKKIKPEAFEANRFYTVINKKSGEIVPMEVNFNFDDPNLIILPLAFGKRQGREFIWNDLLSLETGSLKLANGRVIEKTLYNRRTRQDEPALFVALTFERREVLDSSNIKPMNLIGVDRGENIPAVIALTDPEGCPLSRFKDSLGNPTHILRIGESYKEKQRTIQAKKEVEQRRAGGYSRKYASKAKNLADDMVRNTARDLLYYAVTQDAMLIFENLSRGFGRQGKRTFMAERQYTRMEDWLTAKLAYEGLPSKTYLSKTLAQYTSKTCSNCGFTITSADYDRVLEKLKKTATGWMTTINGKELKVEGQITYYNRYKRQNVVKDLSVELDRLSEESVNNDISSWTKGRSGEALSLLKKRFSHRPVQEKFVCLNCGFETHADEQAALNIARSWLFLRSQEYKKYQTNKTTGNTDKRAFVETWQSFYRKKLKEVWKPAV

SEQ ID NO: 19916 - protein, 979 aa, synthetic construct
MQEIKRINKIRRRLVKDSNTKKAGKTGPMKTLLVPVMTPDLRERLENLRKKPENIPQPISNTSRANLNKLLTDYTEMKKAILHVYWEEFQKDPVGLMSRVAQPASKKIDQNKLKPEMDEKGNLTTAGFACSQCGQPLFVYKLEQVSEKGKAYTNYFGRCNVAEHEKLILLSQLKPEKDSDEAVTYSLGKFGQRALDFYSIHVTKESTHPVKPLAQIAGNRYASGPVGKALSDACMGTIASFLSKYQDIIIEHQKVVKGNQKRLESLRELAGKENLEYPSVTLPPQPHTKEGVDAYNEVIARVRMWVNLNLWQKLKLSRDDAKPLLRLKGFPSFPLVERQANEVDWWDMVCNVKKLINEKKEDGKVFWQNLAGYKRQEALRPYLSSEEDRKKGKKFARYQLGDLLLHLEKKHGEDWGKVYDEAWERIDKKVEGLSKHIKLEEERRSEDAQSKAALTDWLRAKASFVIEGLKEADKDEFCRCELKLQKWYGDLRGKPFAIEAENSILDISGFSKQYNCAFIWQKDGVKKLNLYLIINYFKGGKLRFKKIKPEAFEANRFYTVINKKSGEIVPMEVNFNFDDPNLIILPLAFGKRQGREFIWNDLLSLETGSLKLANGRVIEKTLYNRRTRQDEPALFVALTFERREVLDSSNIKPMNLIGVDRGENIPAVIALTDPEGCPLSRFKDSLGNPTHILRIGESYKEKQRTIQAKKEVEQRRAGGYSRKYASKAKNLADDMVRNTARDLLYYAVTQDAMLIFENLSRGFGRQGKRTFMAERQYTRMEDWLTAKLAYEGLPSKTYLSKTLAQYTSKTCSNCGFTITSADYDRVLEKLKKTATGWMTTINGKELKVEGQITYYNRYKRQNVVKDLSVELDRLSEESVNNDISSWTKGRSGEALSLLKKRFSHRPVQEKFVCLNCGFETHADEQAALNIARSWLFLRSQEYKKYQTNKTTGNTDKRAFVETWQSFYRKKLKEVWKPAV

SEQ ID NO: 19917 - protein, 979 aa, synthetic construct
MQEIKRINKIRRRLVKDSNTKKAGKTGPMKTLLVPVMTPDLRERLENLRKKPENIPQPISNTSRANLNKLLTDYTEMKKAILHVYWEEFQKDPVGLMSRVAQPASKKIDQNKLKPEMDEKGNLTTAGFACSQCGQPLFVYKLEQVSEKGKAYTNYFGRCNVAEHEKLILLAQLKPEKDSDEAVTYSLGKFGQRALDFYSIHVTKESTHPVKPLAQIAGNRYASTPVGKALSDACMGTIASFLSKYQDIIIEHQKVVKGNQKRLESLRELAGKENLEYPSVTLPPQPHTKEGVDAYNEVIARVRMWVNLNLWQKLKLSRDDAKPLLRLKGFPSFPLVERQANEVDWWDMVCNVKKLINEKKEDGKVFWQNLAGYKRQEALRPYLSSEEDRKKGKKFARYQLGDLLLHLEKKHGEDWGKVYDEAWERIDKKVEGLSKHIKLEEERRSEDAQSKAALTDWLRAKASFVIEGLKEADKDEFCRCELKLQKWYGDLRGKPFAIEAENSILDISGFSKQYNCAFIWQKDGVKKLNLYLIINYFKGGKLRFKKIKPEAFEANRFYTVINKKSGEIVPMEVNFNFDDPNLIILPLAFGKRQGREFIWNDLLSLETGSLKLANGRVIEKTLYNRRTRQDEPALFVALTFERREVLDSSNIKPMNLIGVDRGENIPAVIALTDPEGCPLSRFKDSLGNPTHILRIGESYKEKQRTIQAKKEVEQRRAGGYSRKYASKAKNLADDMVRNTARDLLYYAVTQDAMLIFENLSRGFGRQGKRTFMAERQYTRMEDWLTAKLAYEGLPSKTYLSKTLAQYTSKTCSNCGFTITSADYDRVLEKLKKTATGWMTTINGKELKVEGQITYYNRYKRQNVVKDLSVELDRLSEESVNNDISSWTKGRSGEALSLLKKRFSHRPVQEKFVCLNCGFETHADEQAALNIARSWLFLRSQEYKKYQTNKTTGNTDKRAFVETWQSFYRKKLKEVWKPAV

SEQ ID NO: 19918 - protein, 979 aa, synthetic construct
MQEIKRINKIRRRLVKDSNTKKAGKTGPMKTLLVPVMTPDLRERLENLRKKPENIPQPISNTSRANLNKLLTDYTEMKKAILHVYWEEFQKDPVGLMSRVAQPASKKIDQNKLKPEMDEKGNLTTAGFACSQCGQPLFVYKLEQVSEKGKAYTNYFGRCNVAEHEKLILLAQLKPEKDSDEAVTYSLGKFGQRALDFYSIHVTKESTHPVKPLAQIAGNRYASGPVGKALSDACMGTIASFLSKYQDIIIEHQKVVKGNQKRLESLRELAGKENLEYPSVTLPPQPHTKEGVDAYNEVIARVRTWVNLNLWQKLKLSRDDAKPLLRLKGFPSFPLVERQANEVDWWDMVCNVKKLINEKKEDGKVFWQNLAGYKRQEALRPYLSSEEDRKKGKKFARYQLGDLLLHLEKKHGEDWGKVYDEAWERIDKKVEGLSKHIKLEEERRSEDAQSKAALTDWLRAKASFVIEGLKEADKDEFCRCELKLQKWYGDLRGKPFAIEAENSILDISGFSKQYNCAFIWQKDGVKKLNLYLIINYFKGGKLRFKKIKPEAFEANRFYTVINKKSGEIVPMEVNFNFDDPNLIILPLAFGKRQGREFIWNDLLSLETGSLKLANGRVIEKTLYNRRTRQDEPALFVALTFERREVLDSSNIKPMNLIGVDRGENIPAVIALTDPEGCPLSRFKDSLGNPTHILRIGESYKEKQRTIQAKKEVEQRRAGGYSRKYASKAKNLADDMVRNTARDLLYYAVTQDAMLIFENLSRGFGRQGKRTFMAERQYTRMEDWLTAKLAYEGLPSKTYLSKTLAQYTSKTCSNCGFTITSADYDRVLEKLKKTATGWMTTINGKELKVEGQITYYNRYKRQNVVKDLSVELDRLSEESVNNDISSWTKGRSGEALSLLKKRFSHRPVQEKFVCLNCGFETHADEQAALNIARSWLFLRSQEYKKYQTNKTTGNTDKRAFVETWQSFYRKKLKEVWKPAV

SEQ ID NO: 19919 - protein, 979 aa, synthetic construct
MQEIKRINKIRRRLVKDSNTKKAGKTGPMKTLLVPVMTPDLRERLENLRKKPENIPQPISNTSRANLNKLLTDYTEMKKAILHVYWEEFQKDPVGLMSRVAQPASKKIDQNKLKPEMDEKGNLTTAGFACSQCGQPLFVYKLEQVSEKGKAYTNYFGRCNVAEHEKLILLAQLKPEKDSDEAVTYSLGKFGQRALDFYSIHVTKESTHPVKPLAQIAGNRYASGPVGKALSDACMGTIASFLSKYQDIIIEHQKVVKGNQKRLESLRELAGKENLEYPSVTLPPQPHTKEGVDAYNEVIARVRMWVNLNLWQKLKLSRDDAKPLLRLKGFPSFPLVERQANEVDWWDMVCNVKKLINEKKEDGKVFWQNLAGYKRQEALRPYLSSEEDRKKGKKFARTQLGDLLLHLEKKHGEDWGKVYDEAWERIDKKVEGLSKHIKLEEERRSEDAQSKAALTDWLRAKASFVIEGLKEADKDEFCRCELKLQKWYGDLRGKPFAIEAENSILDISGFSKQYNCAFIWQKDGVKKLNLYLIINYFKGGKLRFKKIKPEAFEANRFYTVINKKSGEIVPMEVNFNFDDPNLIILPLAFGKRQGREFIWNDLLSLETGSLKLANGRVIEKTLYNRRTRQDEPALFVALTFERREVLDSSNIKPMNLIGVDRGENIPAVIALTDPEGCPLSRFKDSLGNPTHILRIGESYKEKQRTIQAKKEVEQRRAGGYSRKYASKAKNLADDMVRNTARDLLYYAVTQDAMLIFENLSRGFGRQGKRTFMAERQYTRMEDWLTAKLAYEGLPSKTYLSKTLAQYTSKTCSNCGFTITSADYDRVLEKLKKTATGWMTTINGKELKVEGQITYYNRYKRQNVVKDLSVELDRLSEESVNNDISSWTKGRSGEALSLLKKRFSHRPVQEKFVCLNCGFETHADEQAALNIARSWLFLRSQEYKKYQTNKTTGNTDKRAFVETWQSFYRKKLKEVWKPAV

SEQ ID NO: 19920 - protein, 979 aa, synthetic construct
MQEIKRINKIRRRLVKDSNTKKAGKTGPMKTLLVPVMTPDLRERLENLRKKPENIPQPISNTSRANLNKLLTDYTEMKKAILHVYWEEFQKDPVGLMSRVAQPASKKIDQNKLKPEMDEKGNLTTAGFACSQCGQPLFVYKLEQVSEKGKAYTNYFGRCNVAEHEKLILLAQLKPEKDSDEAVTYSLGKFGQRALDFYSIHVTKESTHPVKPLAQIAGNRYASGPVGKALSDACMGTIASFLSKYQDIIIEHQKVVKGNQKRLESLRELAGKENLEYPSVTLPPQPHTKEGVDAYNEVIARVRMWVNLNLWQKLKLSRDDAKPLLRLKGFPSFPLVERQANEVDWWDMVCNVKKLINEKKEDGKVFWQNLAGYKRQEALRPYLSSEEDRKKGKKFARYQLGDLLLHLEKKHGEDWGKVYDEAWERIDKKVEGLSKHIKLEEERRSEDAQSKAALTDWLRAKASFVIEGLKEADKDEFCRCELKLQKWYGDLRGKPFAIEAENSILDISGFSKQYNCAFIWQKDGVKKLNLYLIINYFKGGKLRFKKIKPEAFEANRFYTVINKKSGEIVPMEVNFNFDDPNLIILPLAFGKRQGREFIWNDLLSLETGSLKLANGRVIEKTLYNRRTRQDEPALFVALTFERREVLDSSNIKPMNLIGVDRGENIPAVIALTDPEGCPLSRFKDSLGNPTHILRIGESYKEKQRTIQAKKEVEQRRAGGYSRKYASKAKNLADDMVRNTARDLLYYAVTQDAMLIFENLSRGFGRQGKRTFMAERQYTRMEDWLTAKLAYEGLPSKTYLSKTLAQYTSKTCSNCGFTITSADYDRMLEKLKKTATGWMTTINGKELKVEGQITYYNRYKRQNVVKDLSVELDRLSEESVNNDISSWTKGRSGEALSLLKKRFSHRPVQEKFVCLNCGFETHADEQAALNIARSWLFLRSQEYKKYQTNKTTGNTDKRAFVETWQSFYRKKLKEVWKPAV

SEQ ID NO: 19921 - protein, 979 aa, synthetic construct
MQEIKRINKIRRRLVKDSNTKKAGKTGPMKTLLVPVMTPDLRERLENLRKKPENIPQPISNTSRANLNKLLTDYTEMKKAILHVYWEEFQKDPVGLMSRVAQPASKKIDQNKLKPEMDEKGNLTTAGFACSQCGQPLFVYKLEQVSEKGKAYTNYFGRCNVAEHEKLILLAQLKPEKDSDEAVTYSLGKFGQRALDFYSIHVTKESTHPVKPLAQIAGNRYASGPVGKALSDACMGTIASFLSKYQDIIIEHQKVVKGNQKRLESLRELAGKENLEYPSVTLPPQPHTKEGVDAYNEVIARVRMWVNLNLWQKLKLSRDDAKPLLRLKGFPSFPLVERQANEVDWWDMVCNVKKLINEKKEDGKVFWQNLAGYKRQEALRPYLSSEEDRKKGKKFARYQLGDLLLHLEKKHGEDWGKVYDEAWERIDKKVEGLSKHIKLEEERRSEDAQSKAALTDWLRAKASFVIEGLKEADKDEFCRCELKLQKWYGDLRGKPFAIEAENSILDISGFSKQYNCAFIWQKDGVKKLNLYLIINYFKGGKLRFKKIKPEAFEANRFYTVINKKSGEIVPMEVNFNFDDPNLIILPLAFGKRQGREFIWNDLLSLETGSLKLANGRVIEKTLYNRRTRQDEPALFVALTFERREVLDSSNIKPMNLIGVDRGENIPAVIALTDPEGCPLSRFKDSLGNPTHILRIGESYKEKQRTIQAKKEVEQRRAGGYSRKYASKAKNLADDMVRNTARDLLYYAVTQDAMLIFENLSRGFGRQGKRTFMAERQYTRMEDWLTAKLAYEGLPSKTYLSKTLAQYTSKTCSNCGFTITSADYDRVLEKLKKTATGWMTTINGKELKVEGQITYYNRYKRQNVVKDLSVELDRLSEESVNNDISSWDKGRSGEALSLLKKRFSHRPVQEKFVCLNCGFETHADEQAALNIARSWLFLRSQEYKKYQTNKTTGNTDKRAFVETWQSFYRKKLKEVWKPAV

SEQ ID NO: 19922 - protein, 979 aa, synthetic construct
MQEIKRINKIRRRLVKDSNTKKAGKTGPMKTLLVPVMTPDLRERLENLRKKPENIPQPISNTSRANLNKLLTDYTEMKKAILHVYWEEFQKDPVGLMSRVAQPASKKIDQNKLKPEMDEKGNLTTAGFACSQCGQPLFVYKLEQVSEKGKAYTNYFGRCNVAEHEKLILLAQLKPEKDSDEAVTYSLGKFGQRALDFYSIHVTKESTHPVKPLAQIAGNRYASGPVGKALSDACMGTIASFLSKYQDIIIEHQKVVKGNQKRLESLRELAGKENLEYPSVTLPPQPHTKEGVDAYNEVIARVRMWVNLNLWQKLKLSRDDAKPLLRLKGFPSFPLVERQANEVDWWDMVCNVKKLINEKKEDGKVFWQNLAGYKRQEALRPYLSSEEDRKKGKKFARYQLGDLLLHLEKKHGEDWGKVYDEAWERIDKKVEGLSKHIKLEEERRSEDAQSKAALTDWLRAKASFVIEGLKEADKDEFCRCELKLQKWYGDLRGKPFAIEAENSILDISGFSKQYNCAFIWQKDGVKKLNLYLIINYFKGGKLRFKKIKPEAFEANRFYTVINKKSGEIVPMEVNFNFDDPNLIILPLAFGKRQGREFIWNDLLSLETGSLKLANGRVIEKTLYNRRTRQDEPALFVALTFERREVLDSSNIKPMNLIGVDRGENIPAVIALTDPEGCPLSRFKDSLGNPTHILRIGESYKEKQRTIQAKKEVEQRRAGGYSRKYASKAKNLADDMVRNTARDLLYYAVTQDAMLIFENLSRGFGRQGKRTFMAERQYTRMEDWLTAKLAYEGLPSKTYLSKTLAQYTSKTCSNCGFTITSADYDRVLEKLKKTATGWMTTINGKELKVEGQITYYNRYKRQNVVKDLSVELDRLSEESVNNDISSWTKGRQGEALSLLKKRFSHRPVQEKFVCLNCGFETHADEQAALNIARSWLFLRSQEYKKYQTNKTTGNTDKRAFVETWQSFYRKKLKEVWKPAV

SEQ ID NO: 19923 - protein, 979 aa, synthetic construct
MQEIKRINKIRRRLVKDSNTKKAGKTGPMKTLLVRVMTPDLRERLENLRKKPENIPQPISNTSRANLNKLLTDYTEMKKAILHVYWEEFQKDPVGLMSRVAQPASKKIDQNKLKPEMDEKGNLTTAGFACSQCGQPLFVYKLEQVSEKGKAYTNYFGRCNVAEHEKLILLAQLKPEKDSDEAVTYSLGKFGQRALDFYSIHVTKESTHPVKPLAQIAGNRYASGPVGKALSDACMGTIASFLSKYQDIIIEHQKVVKGNQKRLESLRELAGKENLEYPSVTLPPQPHTKEGVDAYNEVIARVRMWVNLNLWQKLKLSRDDAKPLLRLKGFPSFPLVERQANEVDWWDMVCNVKKLINEKKEDGKVFWQNLAGYKRQEALRPYLSSEEDRKKGKKFARYQLGDLLLHLEKKHGEDWGKVYDEAWERIDKKVEGLSKHIKLEEERRSEDAQSKAALTDWLRAKASFVIEGLKEADKDEFCRCELKLQKWYGDLRGKPFAIEAENSILDISGFSKQYNCAFIWQKDGVKKLNLYLIINYFKGGKLRFKKIKPEAFEANRFYTVINKKSGEIVPMEVNFNFDDPNLIILPLAFGKRQGREFIWNDLLSLETGSLKLANGRVIEKTLYNRRTRQDEPALFVALTFERREVLDSSNIKPMNLIGVDRGENIPAVIALTDPEGCPLSRFKDSLGNPTHILRIGESYKEKQRTIQAKKEVEQRRAGGYSRKYASKAKNLADDMVRNTARDLLYYAVTQDAMLIFENLSRGFGRQGKRTFMAERQYTRMEDWLTAKLAYEGLPSKTYLSKTLAQYTSKTCSNCGFTITSADYDRVLEKLKKTATGWMTTINGKELKVEGQITYYNRYKRQNVVKDLSVELDRLSEESVNNDISSWDKGRQGEALSLLKKRFSHRPVQEKFVCLNCGFETHADEQAALNIARSWLFLRSQEYKKYQTNKTTGNTDKRAFVETWQSFYRKKLKEVWKPAV

SEQ ID NO: 19924 - protein, 979 aa, synthetic construct
MQEIKRINKIRRRLVKDSNTKKAGKTGPMKTLLVRVMTPDLRERLENLRKKPENIPQPISNTSQANLNKLLTDYTEMKKAILHVYWEEFQKDPVGLMSRVAQPASKKIDQNKLKPEMDEKGNLTTAGFACSQCGQPLFVYKLEQVSEKGKAYTNYFGRCNVAEHEKLIKLAQLKPEKDSDEAVTYSLGKFGQRALDFYSIHVTKESTHPVKPLAQIAGNRYASGPVGKALSDACMGTIASFLSKYQDIIIEHQKVVKGNQKRLESLRELAGKENLEYPSVTLPPQPHTKEGVDAYNEVIARVRMWVNLNLWQKLKLSRDDAKPLLRLKGFPSFPLVERQANEVDWWDMVCNVKKLINEKKEDGKVFWQNLAGYKRQEALRPYLSSEEDRKKGKKFARYQLGDLLLHLEKKHGEDWGKVYDEAWERIDKKVEGLSKHIKLEEERRSEDAQSKAALTDWLRAKASFVIEGLKEADKDEFCRCELKLQKWYGDLRGKPFAIEAENSILDISGFSKQYNCAFIWQKDGVKKLNLYLIINYFKGGKLRFKKIKPEAFEANRFYTVINKKSGEIVPMEVNFNFDDPNLIILPLAFGKRQGREFIWNDLLSLETGSLKLANGRVIEKTLYNRRTRQDEPALFVALTFERREVLDSSNIKPMNLIGVDRGENIPAVIALTDPEGCPLSRFKDSLGNPTHILRIGESYKEKQRTIQAKKEVEQRRAGGYSRKYASKAKNLADDMVRNTARDLLYYAVTQDAMLIFENLSRGFGRQGKRTFMAERQYTRMEDWLTAKLAYEGLPSKTYLSKTLAQYTSKTCSNCGFTITSADYDRVLEKLKKTATGWMTTINGKELKVEGQITYYNRYKRQNVVKDLSVELDRLSEESVNNDISSWTKGRSGEALSLLKKRFSHRPVQEKFVCLNCGFETHADEQAALNIARSWLFLRSQEYKKYQTNKTTGNTDKRAFVETWQSFYRKKLKEVWKPAV

SEQ ID NO: 19925 - protein, 979 aa, synthetic construct
MQEIKRINKIRRRLVKDSNTKKAGKTGPMKTLLVRVMTPDLRERLENLRKKPENIPQPISNTSQANLNKLLTDYTEMKKAILHVYWEEFQKDPVGLMSRVAQPASKKIDQNKLKPEMDEKGNLTTAGFACSQCGQPLFVYKLEQVSEKGKAYTNYFGRCNVAEHEKLIQLAQLKPEKDSDEAVTYSLGKFGQRALDFYSIHVTKESTHPVKPLAQIAGNRYASGPVGKALSDACMGTIASFLSKYQDIIIEHQKVVKGNQKRLESLRELAGKENLEYPSVTLPPQPHTKEGVDAYNEVIARVRMWVNLNLWQKLKLSRDDAKPLLRLKGFPSFPLVERQANEVDWWDMVCNVKKLINEKKEDGKVFWQNLAGYKRQEALRPYLSSEEDRKKGKKFARYQLGDLLLHLEKKHGEDWGKVYDEAWERIDKKVEGLSKHIKLEEERRSEDAQSKAALTDWLRAKASFVIEGLKEADKDEFCRCELKLQKWYGDLRGKPFAIEAENSILDISGFSKQYNCAFIWQKDGVKKLNLYLIINYFKGGKLRFKKIKPEAFEANRFYTVINKKSGEIVPMEVNFNFDDPNLIILPLAFGKRQGREFIWNDLLSLETGSLKLANGRVIEKTLYNRRTRQDEPALFVALTFERREVLDSSNIKPMNLIGVDRGENIPAVIALTDPEGCPLSRFKDSLGNPTHILRIGESYKEKQRTIQAKKEVEQRRAGGYSRKYASKAKNLADDMVRNTARDLLYYAVTQDAMLIFENLSRGFGRQGKRTFMAERQYTRMEDWLTAKLAYEGLPSKTYLSKTLAQYTSKTCSNCGFTITSADYDRVLEKLKKTATGWMTTINGKELKVEGQITYYNRYKRQNVVKDLSVELDRLSEESVNNDISSWTKGRSGEALSLLKKRFSHRPVQEKFVCLNCGFETHADEQAALNIARSWLFLRSQEYKKYQTNKTTGNTDKRAFVETWQSFYRKKLKEVWKPAV

SEQ ID NO: 19926 - protein, 979 aa, synthetic construct
MQEIKRINKIRRRLVKDSNTKKAGKTGPMKTLLVRVMTPDLRERLENLRKKPENIPQPISNTSQANLNKLLTDYTEMKKAILHVYWEEFQKDPVGLMSRVAQPASKKIDQNKLKPEMDEKGNLTTAGFACSQCGQPLFVYKLEQVSEKGKAYTNYFGRCNVAEHEKLILLDQLKPEKDSDEAVTYSLGKFGQRALDFYSIHVTKESTHPVKPLAQIAGNRYASGPVGKALSDACMGTIASFLSKYQDIIIEHQKVVKGNQKRLESLRELAGKENLEYPSVTLPPQPHTKEGVDAYNEVIARVRMWVNLNLWQKLKLSRDDAKPLLRLKGFPSFPLVERQANEVDWWDMVCNVKKLINEKKEDGKVFWQNLAGYKRQEALRPYLSSEEDRKKGKKFARYQLGDLLLHLEKKHGEDWGKVYDEAWERIDKKVEGLSKHIKLEEERRSEDAQSKAALTDWLRAKASFVIEGLKEADKDEFCRCELKLQKWYGDLRGKPFAIEAENSILDISGFSKQYNCAFIWQKDGVKKLNLYLIINYFKGGKLRFKKIKPEAFEANRFYTVINKKSGEIVPMEVNFNFDDPNLIILPLAFGKRQGREFIWNDLLSLETGSLKLANGRVIEKTLYNRRTRQDEPALFVALTFERREVLDSSNIKPMNLIGVDRGENIPAVIALTDPEGCPLSRFKDSLGNPTHILRIGESYKEKQRTIQAKKEVEQRRAGGYSRKYASKAKNLADDMVRNTARDLLYYAVTQDAMLIFENLSRGFGRQGKRTFMAERQYTRMEDWLTAKLAYEGLPSKTYLSKTLAQYTSKTCSNCGFTITSADYDRVLEKLKKTATGWMTTINGKELKVEGQITYYNRYKRQNVVKDLSVELDRLSEESVNNDISSWTKGRSGEALSLLKKRFSHRPVQEKFVCLNCGFETHADEQAALNIARSWLFLRSQEYKKYQTNKTTGNTDKRAFVETWQSFYRKKLKEVWKPAV

SEQ ID NO: 19927 - protein, 979 aa, synthetic construct
MQEIKRINKIRRRLVKDSNTKKAGKTGPMKTLLVRVMTPDLRERLENLRKKPENIPQPISNTSQANLNKLLTDYTEMKKAILHVYWEEFQKDPVGLMSRVAQPASKKIDQNKLKPEMDEKGNLTTAGFACSQCGQPLFVYKLEQVSEKGKAYTNYFGRCNVAEHEKLILLYQLKPEKDSDEAVTYSLGKFGQRALDFYSIHVTKESTHPVKPLAQIAGNRYASGPVGKALSDACMGTIASFLSKYQDIIIEHQKVVKGNQKRLESLRELAGKENLEYPSVTLPPQPHTKEGVDAYNEVIARVRMWVNLNLWQKLKLSRDDAKPLLRLKGFPSFPLVERQANEVDWWDMVCNVKKLINEKKEDGKVFWQNLAGYKRQEALRPYLSSEEDRKKGKKFARYQLGDLLLHLEKKHGEDWGKVYDEAWERIDKKVEGLSKHIKLEEERRSEDAQSKAALTDWLRAKASFVIEGLKEADKDEFCRCELKLQKWYGDLRGKPFAIEAENSILDISGFSKQYNCAFIWQKDGVKKLNLYLIINYFKGGKLRFKKIKPEAFEANRFYTVINKKSGEIVPMEVNFNFDDPNLIILPLAFGKRQGREFIWNDLLSLETGSLKLANGRVIEKTLYNRRTRQDEPALFVALTFERREVLDSSNIKPMNLIGVDRGENIPAVIALTDPEGCPLSRFKDSLGNPTHILRIGESYKEKQRTIQAKKEVEQRRAGGYSRKYASKAKNLADDMVRNTARDLLYYAVTQDAMLIFENLSRGFGRQGKRTFMAERQYTRMEDWLTAKLAYEGLPSKTYLSKTLAQYTSKTCSNCGFTITSADYDRVLEKLKKTATGWMTTINGKELKVEGQITYYNRYKRQNVVKDLSVELDRLSEESVNNDISSWTKGRSGEALSLLKKRFSHRPVQEKFVCLNCGFETHADEQAALNIARSWLFLRSQEYKKYQTNKTTGNTDKRAFVETWQSFYRKKLKEVWKPAV

SEQ ID NO: 19928 - protein, 979 aa, synthetic construct
MQEIKRINKIRRRLVKDSNTKKAGKTGPMKTLLVRVMTPDLRERLENLRKKPENIPQPISNTSQANLNKLLTDYTEMKKAILHVYWEEFQKDPVGLMSRVAQPASKKIDQNKLKPEMDEKGNLTTAGFACSQCGQPLFVYKLEQVSEKGKAYTNYFGRCNVAEHEKLILLSQLKPEKDSDEAVTYSLGKFGQRALDFYSIHVTKESTHPVKPLAQIAGNRYASGPVGKALSDACMGTIASFLSKYQDIIIEHQKVVKGNQKRLESLRELAGKENLEYPSVTLPPQPHTKEGVDAYNEVIARVRMWVNLNLWQKLKLSRDDAKPLLRLKGFPSFPLVERQANEVDWWDMVCNVKKLINEKKEDGKVFWQNLAGYKRQEALRPYLSSEEDRKKGKKFARYQLGDLLLHLEKKHGEDWGKVYDEAWERIDKKVEGLSKHIKLEEERRSEDAQSKAALTDWLRAKASFVIEGLKEADKDEFCRCELKLQKWYGDLRGKPFAIEAENSILDISGFSKQYNCAFIWQKDGVKKLNLYLIINYFKGGKLRFKKIKPEAFEANRFYTVINKKSGEIVPMEVNFNFDDPNLIILPLAFGKRQGREFIWNDLLSLETGSLKLANGRVIEKTLYNRRTRQDEPALFVALTFERREVLDSSNIKPMNLIGVDRGENIPAVIALTDPEGCPLSRFKDSLGNPTHILRIGESYKEKQRTIQAKKEVEQRRAGGYSRKYASKAKNLADDMVRNTARDLLYYAVTQDAMLIFENLSRGFGRQGKRTFMAERQYTRMEDWLTAKLAYEGLPSKTYLSKTLAQYTSKTCSNCGFTITSADYDRVLEKLKKTATGWMTTINGKELKVEGQITYYNRYKRQNVVKDLSVELDRLSEESVNNDISSWTKGRSGEALSLLKKRFSHRPVQEKFVCLNCGFETHADEQAALNIARSWLFLRSQEYKKYQTNKTTGNTDKRAFVETWQSFYRKKLKEVWKPAV

SEQ ID NO: 19929 - protein, 979 aa, synthetic construct
MQEIKRINKIRRRLVKDSNTKKAGKTGPMKTLLVRVMTPDLRERLENLRKKPENIPQPISNTSQANLNKLLTDYTEMKKAILHVYWEEFQKDPVGLMSRVAQPASKKIDQNKLKPEMDEKGNLTTAGFACSQCGQPLFVYKLEQVSEKGKAYTNYFGRCNVAEHEKLILLAQLKPEKDSDEAVTYSLGKFGQRALDFYSIHVTKESTHPVKPLAQIAGNRYASTPVGKALSDACMGTIASFLSKYQDIIIEHQKVVKGNQKRLESLRELAGKENLEYPSVTLPPQPHTKEGVDAYNEVIARVRMWVNLNLWQKLKLSRDDAKPLLRLKGFPSFPLVERQANEVDWWDMVCNVKKLINEKKEDGKVFWQNLAGYKRQEALRPYLSSEEDRKKGKKFARYQLGDLLLHLEKKHGEDWGKVYDEAWERIDKKVEGLSKHIKLEEERRSEDAQSKAALTDWLRAKASFVIEGLKEADKDEFCRCELKLQKWYGDLRGKPFAIEAENSILDISGFSKQYNCAFIWQKDGVKKLNLYLIINYFKGGKLRFKKIKPEAFEANRFYTVINKKSGEIVPMEVNFNFDDPNLIILPLAFGKRQGREFIWNDLLSLETGSLKLANGRVIEKTLYNRRTRQDEPALFVALTFERREVLDSSNIKPMNLIGVDRGENIPAVIALTDPEGCPLSRFKDSLGNPTHILRIGESYKEKQRTIQAKKEVEQRRAGGYSRKYASKAKNLADDMVRNTARDLLYYAVTQDAMLIFENLSRGFGRQGKRTFMAERQYTRMEDWLTAKLAYEGLPSKTYLSKTLAQYTSKTCSNCGFTITSADYDRVLEKLKKTATGWMTTINGKELKVEGQITYYNRYKRQNVVKDLSVELDRLSEESVNNDISSWTKGRSGEALSLLKKRFSHRPVQEKFVCLNCGFETHADEQAALNIARSWLFLRSQEYKKYQTNKTTGNTDKRAFVETWQSFYRKKLKEVWKPAV

SEQ ID NO: 19930 - protein, 979 aa, synthetic construct
MQEIKRINKIRRRLVKDSNTKKAGKTGPMKTLLVRVMTPDLRERLENLRKKPENIPQPISNTSQANLNKLLTDYTEMKKAILHVYWEEFQKDPVGLMSRVAQPASKKIDQNKLKPEMDEKGNLTTAGFACSQCGQPLFVYKLEQVSEKGKAYTNYFGRCNVAEHEKLILLAQLKPEKDSDEAVTYSLGKFGQRALDFYSIHVTKESTHPVKPLAQIAGNRYASGPVGKALSDACMGTIASFLSKYQDIIIEHQKVVKGNQKRLESLRELAGKENLEYPSVTLPPQPHTKEGVDAYNEVIARVRTWVNLNLWQKLKLSRDDAKPLLRLKGFPSFPLVERQANEVDWWDMVCNVKKLINEKKEDGKVFWQNLAGYKRQEALRPYLSSEEDRKKGKKFARYQLGDLLLHLEKKHGEDWGKVYDEAWERIDKKVEGLSKHIKLEEERRSEDAQSKAALTDWLRAKASFVIEGLKEADKDEFCRCELKLQKWYGDLRGKPFAIEAENSILDISGFSKQYNCAFIWQKDGVKKLNLYLIINYFKGGKLRFKKIKPEAFEANRFYTVINKKSGEIVPMEVNFNFDDPNLIILPLAFGKRQGREFIWNDLLSLETGSLKLANGRVIEKTLYNRRTRQDEPALFVALTFERREVLDSSNIKPMNLIGVDRGENIPAVIALTDPEGCPLSRFKDSLGNPTHILRIGESYKEKQRTIQAKKEVEQRRAGGYSRKYASKAKNLADDMVRNTARDLLYYAVTQDAMLIFENLSRGFGRQGKRTFMAERQYTRMEDWLTAKLAYEGLPSKTYLSKTLAQYTSKTCSNCGFTITSADYDRVLEKLKKTATGWMTTINGKELKVEGQITYYNRYKRQNVVKDLSVELDRLSEESVNNDISSWTKGRSGEALSLLKKRFSHRPVQEKFVCLNCGFETHADEQAALNIARSWLFLRSQEYKKYQTNKTTGNTDKRAFVETWQSFYRKKLKEVWKPAV

SEQ ID NO: 19931 - protein, 979 aa, synthetic construct
MQEIKRINKIRRRLVKDSNTKKAGKTGPMKTLLVRVMTPDLRERLENLRKKPENIPQPISNTSQANLNKLLTDYTEMKKAILHVYWEEFQKDPVGLMSRVAQPASKKIDQNKLKPEMDEKGNLTTAGFACSQCGQPLFVYKLEQVSEKGKAYTNYFGRCNVAEHEKLILLAQLKPEKDSDEAVTYSLGKFGQRALDFYSIHVTKESTHPVKPLAQIAGNRYASGPVGKALSDACMGTIASFLSKYQDIIIEHQKVVKGNQKRLESLRELAGKENLEYPSVTLPPQPHTKEGVDAYNEVIARVRMWVNLNLWQKLKLSRDDAKPLLRLKGFPSFPLVERQANEVDWWDMVCNVKKLINEKKEDGKVFWQNLAGYKRQEALRPYLSSEEDRKKGKKFARTQLGDLLLHLEKKHGEDWGKVYDEAWERIDKKVEGLSKHIKLEEERRSEDAQSKAALTDWLRAKASFVIEGLKEADKDEFCRCELKLQKWYGDLRGKPFAIEAENSILDISGFSKQYNCAFIWQKDGVKKLNLYLIINYFKGGKLRFKKIKPEAFEANRFYTVINKKSGEIVPMEVNFNFDDPNLIILPLAFGKRQGREFIWNDLLSLETGSLKLANGRVIEKTLYNRRTRQDEPALFVALTFERREVLDSSNIKPMNLIGVDRGENIPAVIALTDPEGCPLSRFKDSLGNPTHILRIGESYKEKQRTIQAKKEVEQRRAGGYSRKYASKAKNLADDMVRNTARDLLYYAVTQDAMLIFENLSRGFGRQGKRTFMAERQYTRMEDWLTAKLAYEGLPSKTYLSKTLAQYTSKTCSNCGFTITSADYDRVLEKLKKTATGWMTTINGKELKVEGQITYYNRYKRQNVVKDLSVELDRLSEESVNNDISSWTKGRSGEALSLLKKRFSHRPVQEKFVCLNCGFETHADEQAALNIARSWLFLRSQEYKKYQTNKTTGNTDKRAFVETWQSFYRKKLKEVWKPAV

SEQ ID NO: 19932 - protein, 979 aa, synthetic construct
MQEIKRINKIRRRLVKDSNTKKAGKTGPMKTLLVRVMTPDLRERLENLRKKPENIPQPISNTSQANLNKLLTDYTEMKKAILHVYWEEFQKDPVGLMSRVAQPASKKIDQNKLKPEMDEKGNLTTAGFACSQCGQPLFVYKLEQVSEKGKAYTNYFGRCNVAEHEKLILLAQLKPEKDSDEAVTYSLGKFGQRALDFYSIHVTKESTHPVKPLAQIAGNRYASGPVGKALSDACMGTIASFLSKYQDIIIEHQKVVKGNQKRLESLRELAGKENLEYPSVTLPPQPHTKEGVDAYNEVIARVRMWVNLNLWQKLKLSRDDAKPLLRLKGFPSFPLVERQANEVDWWDMVCNVKKLINEKKEDGKVFWQNLAGYKRQEALRPYLSSEEDRKKGKKFARYQLGDLLLHLEKKHGEDWGKVYDEAWERIDKKVEGLSKHIKLEEERRSEDAQSKAALTDWLRAKASFVIEGLKEADKDEFCRCELKLQKWYGDLRGKPFAIEAENSILDISGFSKQYNCAFIWQKDGVKKLNLYLIINYFKGGKLRFKKIKPEAFEANRFYTVINKKSGEIVPMEVNFNFDDPNLIILPLAFGKRQGREFIWNDLLSLETGSLKLANGRVIEKTLYNRRTRQDEPALFVALTFERREVLDSSNIKPMNLIGVDRGENIPAVIALTDPEGCPLSRFKDSLGNPTHILRIGESYKEKQRTIQAKKEVEQRRAGGYSRKYASKAKNLADDMVRNTARDLLYYAVTQDAMLIFENLSRGFGRQGKRTFMAERQYTRMEDWLTAKLAYEGLPSKTYLSKTLAQYTSKTCSNCGFTITSADYDRMLEKLKKTATGWMTTINGKELKVEGQITYYNRYKRQNVVKDLSVELDRLSEESVNNDISSWTKGRSGEALSLLKKRFSHRPVQEKFVCLNCGFETHADEQAALNIARSWLFLRSQEYKKYQTNKTTGNTDKRAFVETWQSFYRKKLKEVWKPAV

SEQ ID NO: 19933 - protein, 979 aa, synthetic construct
MQEIKRINKIRRRLVKDSNTKKAGKTGPMKTLLVRVMTPDLRERLENLRKKPENIPQPISNTSQANLNKLLTDYTEMKKAILHVYWEEFQKDPVGLMSRVAQPASKKIDQNKLKPEMDEKGNLTTAGFACSQCGQPLFVYKLEQVSEKGKAYTNYFGRCNVAEHEKLILLAQLKPEKDSDEAVTYSLGKFGQRALDFYSIHVTKESTHPVKPLAQIAGNRYASGPVGKALSDACMGTIASFLSKYQDIIIEHQKVVKGNQKRLESLRELAGKENLEYPSVTLPPQPHTKEGVDAYNEVIARVRMWVNLNLWQKLKLSRDDAKPLLRLKGFPSFPLVERQANEVDWWDMVCNVKKLINEKKEDGKVFWQNLAGYKRQEALRPYLSSEEDRKKGKKFARYQLGDLLLHLEKKHGEDWGKVYDEAWERIDKKVEGLSKHIKLEEERRSEDAQSKAALTDWLRAKASFVIEGLKEADKDEFCRCELKLQKWYGDLRGKPFAIEAENSILDISGFSKQYNCAFIWQKDGVKKLNLYLIINYFKGGKLRFKKIKPEAFEANRFYTVINKKSGEIVPMEVNFNFDDPNLIILPLAFGKRQGREFIWNDLLSLETGSLKLANGRVIEKTLYNRRTRQDEPALFVALTFERREVLDSSNIKPMNLIGVDRGENIPAVIALTDPEGCPLSRFKDSLGNPTHILRIGESYKEKQRTIQAKKEVEQRRAGGYSRKYASKAKNLADDMVRNTARDLLYYAVTQDAMLIFENLSRGFGRQGKRTFMAERQYTRMEDWLTAKLAYEGLPSKTYLSKTLAQYTSKTCSNCGFTITSADYDRVLEKLKKTATGWMTTINGKELKVEGQITYYNRYKRQNVVKDLSVELDRLSEESVNNDISSWDKGRSGEALSLLKKRFSHRPVQEKFVCLNCGFETHADEQAALNIARSWLFLRSQEYKKYQTNKTTGNTDKRAFVETWQSFYRKKLKEVWKPAV

SEQ ID NO: 19934 - protein, 979 aa, synthetic construct
MQEIKRINKIRRRLVKDSNTKKAGKTGPMKTLLVRVMTPDLRERLENLRKKPENIPQPISNTSQANLNKLLTDYTEMKKAILHVYWEEFQKDPVGLMSRVAQPASKKIDQNKLKPEMDEKGNLTTAGFACSQCGQPLFVYKLEQVSEKGKAYTNYFGRCNVAEHEKLILLAQLKPEKDSDEAVTYSLGKFGQRALDFYSIHVTKESTHPVKPLAQIAGNRYASGPVGKALSDACMGTIASFLSKYQDIIIEHQKVVKGNQKRLESLRELAGKENLEYPSVTLPPQPHTKEGVDAYNEVIARVRMWVNLNLWQKLKLSRDDAKPLLRLKGFPSFPLVERQANEVDWWDMVCNVKKLINEKKEDGKVFWQNLAGYKRQEALRPYLSSEEDRKKGKKFARYQLGDLLLHLEKKHGEDWGKVYDEAWERIDKKVEGLSKHIKLEEERRSEDAQSKAALTDWLRAKASFVIEGLKEADKDEFCRCELKLQKWYGDLRGKPFAIEAENSILDISGFSKQYNCAFIWQKDGVKKLNLYLIINYFKGGKLRFKKIKPEAFEANRFYTVINKKSGEIVPMEVNFNFDDPNLIILPLAFGKRQGREFIWNDLLSLETGSLKLANGRVIEKTLYNRRTRQDEPALFVALTFERREVLDSSNIKPMNLIGVDRGENIPAVIALTDPEGCPLSRFKDSLGNPTHILRIGESYKEKQRTIQAKKEVEQRRAGGYSRKYASKAKNLADDMVRNTARDLLYYAVTQDAMLIFENLSRGFGRQGKRTFMAERQYTRMEDWLTAKLAYEGLPSKTYLSKTLAQYTSKTCSNCGFTITSADYDRVLEKLKKTATGWMTTINGKELKVEGQITYYNRYKRQNVVKDLSVELDRLSEESVNNDISSWTKGRQGEALSLLKKRFSHRPVQEKFVCLNCGFETHADEQAALNIARSWLFLRSQEYKKYQTNKTTGNTDKRAFVETWQSFYRKKLKEVWKPAV

SEQ ID NO: 19935 - protein, 979 aa, synthetic construct
MQEIKRINKIRRRLVKDSNTKKAGKTGPMKTLLVRVMTPDLRERLENLRKKPENIPQPISNTSRANLNKLLTDYTEMKKAILHVYWEEFQKDPVGLMSRVAQPASKKIDQNKLKPEMDEKGNLTTAGFACSQCGQPLFVYKLEQVSEKGKAYTNYFGRCNVAEHEKLIKLDQLKPEKDSDEAVTYSLGKFGQRALDFYSIHVTKESTHPVKPLAQIAGNRYASGPVGKALSDACMGTIASFLSKYQDIIIEHQKVVKGNQKRLESLRELAGKENLEYPSVTLPPQPHTKEGVDAYNEVIARVRMWVNLNLWQKLKLSRDDAKPLLRLKGFPSFPLVERQANEVDWWDMVCNVKKLINEKKEDGKVFWQNLAGYKRQEALRPYLSSEEDRKKGKKFARYQLGDLLLHLEKKHGEDWGKVYDEAWERIDKKVEGLSKHIKLEEERRSEDAQSKAALTDWLRAKASFVIEGLKEADKDEFCRCELKLQKWYGDLRGKPFAIEAENSILDISGFSKQYNCAFIWQKDGVKKLNLYLIINYFKGGKLRFKKIKPEAFEANRFYTVINKKSGEIVPMEVNFNFDDPNLIILPLAFGKRQGREFIWNDLLSLETGSLKLANGRVIEKTLYNRRTRQDEPALFVALTFERREVLDSSNIKPMNLIGVDRGENIPAVIALTDPEGCPLSRFKDSLGNPTHILRIGESYKEKQRTIQAKKEVEQRRAGGYSRKYASKAKNLADDMVRNTARDLLYYAVTQDAMLIFENLSRGFGRQGKRTFMAERQYTRMEDWLTAKLAYEGLPSKTYLSKTLAQYTSKTCSNCGFTITSADYDRVLEKLKKTATGWMTTINGKELKVEGQITYYNRYKRQNVVKDLSVELDRLSEESVNNDISSWTKGRSGEALSLLKKRFSHRPVQEKFVCLNCGFETHADEQAALNIARSWLFLRSQEYKKYQTNKTTGNTDKRAFVETWQSFYRKKLKEVWKPAV

SEQ ID NO: 19936 - protein, 979 aa, synthetic construct
MQEIKRINKIRRRLVKDSNTKKAGKTGPMKTLLVRVMTPDLRERLENLRKKPENIPQPISNTSRANLNKLLTDYTEMKKAILHVYWEEFQKDPVGLMSRVAQPASKKIDQNKLKPEMDEKGNLTTAGFACSQCGQPLFVYKLEQVSEKGKAYTNYFGRCNVAEHEKLIKLYQLKPEKDSDEAVTYSLGKFGQRALDFYSIHVTKESTHPVKPLAQIAGNRYASGPVGKALSDACMGTIASFLSKYQDIIIEHQKVVKGNQKRLESLRELAGKENLEYPSVTLPPQPHTKEGVDAYNEVIARVRMWVNLNLWQKLKLSRDDAKPLLRLKGFPSFPLVERQANEVDWWDMVCNVKKLINEKKEDGKVFWQNLAGYKRQEALRPYLSSEEDRKKGKKFARYQLGDLLLHLEKKHGEDWGKVYDEAWERIDKKVEGLSKHIKLEEERRSEDAQSKAALTDWLRAKASFVIEGLKEADKDEFCRCELKLQKWYGDLRGKPFAIEAENSILDISGFSKQYNCAFIWQKDGVKKLNLYLIINYFKGGKLRFKKIKPEAFEANRFYTVINKKSGEIVPMEVNFNFDDPNLIILPLAFGKRQGREFIWNDLLSLETGSLKLANGRVIEKTLYNRRTRQDEPALFVALTFERREVLDSSNIKPMNLIGVDRGENIPAVIALTDPEGCPLSRFKDSLGNPTHILRIGESYKEKQRTIQAKKEVEQRRAGGYSRKYASKAKNLADDMVRNTARDLLYYAVTQDAMLIFENLSRGFGRQGKRTFMAERQYTRMEDWLTAKLAYEGLPSKTYLSKTLAQYTSKTCSNCGFTITSADYDRVLEKLKKTATGWMTTINGKELKVEGQITYYNRYKRQNVVKDLSVELDRLSEESVNNDISSWTKGRSGEALSLLKKRFSHRPVQEKFVCLNCGFETHADEQAALNIARSWLFLRSQEYKKYQTNKTTGNTDKRAFVETWQSFYRKKLKEVWKPAV

SEQ ID NO: 19937 - protein, 979 aa, synthetic construct
MQEIKRINKIRRRLVKDSNTKKAGKTGPMKTLLVRVMTPDLRERLENLRKKPENIPQPISNTSRANLNKLLTDYTEMKKAILHVYWEEFQKDPVGLMSRVAQPASKKIDQNKLKPEMDEKGNLTTAGFACSQCGQPLFVYKLEQVSEKGKAYTNYFGRCNVAEHEKLIKLSQLKPEKDSDEAVTYSLGKFGQRALDFYSIHVTKESTHPVKPLAQIAGNRYASGPVGKALSDACMGTIASFLSKYQDIIIEHQKVVKGNQKRLESLRELAGKENLEYPSVTLPPQPHTKEGVDAYNEVIARVRMWVNLNLWQKLKLSRDDAKPLLRLKGFPSFPLVERQANEVDWWDMVCNVKKLINEKKEDGKVFWQNLAGYKRQEALRPYLSSEEDRKKGKKFARYQLGDLLLHLEKKHGEDWGKVYDEAWERIDKKVEGLSKHIKLEEERRSEDAQSKAALTDWLRAKASFVIEGLKEADKDEFCRCELKLQKWYGDLRGKPFAIEAENSILDISGFSKQYNCAFIWQKDGVKKLNLYLIINYFKGGKLRFKKIKPEAFEANRFYTVINKKSGEIVPMEVNFNFDDPNLIILPLAFGKRQGREFIWNDLLSLETGSLKLANGRVIEKTLYNRRTRQDEPALFVALTFERREVLDSSNIKPMNLIGVDRGENIPAVIALTDPEGCPLSRFKDSLGNPTHILRIGESYKEKQRTIQAKKEVEQRRAGGYSRKYASKAKNLADDMVRNTARDLLYYAVTQDAMLIFENLSRGFGRQGKRTFMAERQYTRMEDWLTAKLAYEGLPSKTYLSKTLAQYTSKTCSNCGFTITSADYDRVLEKLKKTATGWMTTINGKELKVEGQITYYNRYKRQNVVKDLSVELDRLSEESVNNDISSWTKGRSGEALSLLKKRFSHRPVQEKFVCLNCGFETHADEQAALNIARSWLFLRSQEYKKYQTNKTTGNTDKRAFVETWQSFYRKKLKEVWKPAV

SEQ ID NO: 19938 - protein, 979 aa, synthetic construct
MQEIKRINKIRRRLVKDSNTKKAGKTGPMKTLLVRVMTPDLRERLENLRKKPENIPQPISNTSRANLNKLLTDYTEMKKAILHVYWEEFQKDPVGLMSRVAQPASKKIDQNKLKPEMDEKGNLTTAGFACSQCGQPLFVYKLEQVSEKGKAYTNYFGRCNVAEHEKLIKLAQLKPEKDSDEAVTYSLGKFGQRALDFYSIHVTKESTHPVKPLAQIAGNRYASTPVGKALSDACMGTIASFLSKYQDIIIEHQKVVKGNQKRLESLRELAGKENLEYPSVTLPPQPHTKEGVDAYNEVIARVRMWVNLNLWQKLKLSRDDAKPLLRLKGFPSFPLVERQANEVDWWDMVCNVKKLINEKKEDGKVFWQNLAGYKRQEALRPYLSSEEDRKKGKKFARYQLGDLLLHLEKKHGEDWGKVYDEAWERIDKKVEGLSKHIKLEEERRSEDAQSKAALTDWLRAKASFVIEGLKEADKDEFCRCELKLQKWYGDLRGKPFAIEAENSILDISGFSKQYNCAFIWQKDGVKKLNLYLIINYFKGGKLRFKKIKPEAFEANRFYTVINKKSGEIVPMEVNFNFDDPNLIILPLAFGKRQGREFIWNDLLSLETGSLKLANGRVIEKTLYNRRTRQDEPALFVALTFERREVLDSSNIKPMNLIGVDRGENIPAVIALTDPEGCPLSRFKDSLGNPTHILRIGESYKEKQRTIQAKKEVEQRRAGGYSRKYASKAKNLADDMVRNTARDLLYYAVTQDAMLIFENLSRGFGRQGKRTFMAERQYTRMEDWLTAKLAYEGLPSKTYLSKTLAQYTSKTCSNCGFTITSADYDRVLEKLKKTATGWMTTINGKELKVEGQITYYNRYKRQNVVKDLSVELDRLSEESVNNDISSWTKGRSGEALSLLKKRFSHRPVQEKFVCLNCGFETHADEQAALNIARSWLFLRSQEYKKYQTNKTTGNTDKRAFVETWQSFYRKKLKEVWKPAV

SEQ ID NO: 19939 - protein, 979 aa, synthetic construct
MQEIKRINKIRRRLVKDSNTKKAGKTGPMKTLLVRVMTPDLRERLENLRKKPENIPQPISNTSRANLNKLLTDYTEMKKAILHVYWEEFQKDPVGLMSRVAQPASKKIDQNKLKPEMDEKGNLTTAGFACSQCGQPLFVYKLEQVSEKGKAYTNYFGRCNVAEHEKLIKLAQLKPEKDSDEAVTYSLGKFGQRALDFYSIHVTKESTHPVKPLAQIAGNRYASGPVGKALSDACMGTIASFLSKYQDIIIEHQKVVKGNQKRLESLRELAGKENLEYPSVTLPPQPHTKEGVDAYNEVIARVRTWVNLNLWQKLKLSRDDAKPLLRLKGFPSFPLVERQANEVDWWDMVCNVKKLINEKKEDGKVFWQNLAGYKRQEALRPYLSSEEDRKKGKKFARYQLGDLLLHLEKKHGEDWGKVYDEAWERIDKKVEGLSKHIKLEEERRSEDAQSKAALTDWLRAKASFVIEGLKEADKDEFCRCELKLQKWYGDLRGKPFAIEAENSILDISGFSKQYNCAFIWQKDGVKKLNLYLIINYFKGGKLRFKKIKPEAFEANRFYTVINKKSGEIVPMEVNFNFDDPNLIILPLAFGKRQGREFIWNDLLSLETGSLKLANGRVIEKTLYNRRTRQDEPALFVALTFERREVLDSSNIKPMNLIGVDRGENIPAVIALTDPEGCPLSRFKDSLGNPTHILRIGESYKEKQRTIQAKKEVEQRRAGGYSRKYASKAKNLADDMVRNTARDLLYYAVTQDAMLIFENLSRGFGRQGKRTFMAERQYTRMEDWLTAKLAYEGLPSKTYLSKTLAQYTSKTCSNCGFTITSADYDRVLEKLKKTATGWMTTINGKELKVEGQITYYNRYKRQNVVKDLSVELDRLSEESVNNDISSWTKGRSGEALSLLKKRFSHRPVQEKFVCLNCGFETHADEQAALNIARSWLFLRSQEYKKYQTNKTTGNTDKRAFVETWQSFYRKKLKEVWKPAV

SEQ ID NO: 19940 - protein, 979 aa, synthetic construct
MQEIKRINKIRRRLVKDSNTKKAGKTGPMKTLLVRVMTPDLRERLENLRKKPENIPQPISNTSRANLNKLLTDYTEMKKAILHVYWEEFQKDPVGLMSRVAQPASKKIDQNKLKPEMDEKGNLTTAGFACSQCGQPLFVYKLEQVSEKGKAYTNYFGRCNVAEHEKLIKLAQLKPEKDSDEAVTYSLGKFGQRALDFYSIHVTKESTHPVKPLAQIAGNRYASGPVGKALSDACMGTIASFLSKYQDIIIEHQKVVKGNQKRLESLRELAGKENLEYPSVTLPPQPHTKEGVDAYNEVIARVRMWVNLNLWQKLKLSRDDAKPLLRLKGFPSFPLVERQANEVDWWDMVCNVKKLINEKKEDGKVFWQNLAGYKRQEALRPYLSSEEDRKKGKKFARTQLGDLLLHLEKKHGEDWGKVYDEAWERIDKKVEGLSKHIKLEEERRSEDAQSKAALTDWLRAKASFVIEGLKEADKDEFCRCELKLQKWYGDLRGKPFAIEAENSILDISGFSKQYNCAFIWQKDGVKKLNLYLIINYFKGGKLRFKKIKPEAFEANRFYTVINKKSGEIVPMEVNFNFDDPNLIILPLAFGKRQGREFIWNDLLSLETGSLKLANGRVIEKTLYNRRTRQDEPALFVALTFERREVLDSSNIKPMNLIGVDRGENIPAVIALTDPEGCPLSRFKDSLGNPTHILRIGESYKEKQRTIQAKKEVEQRRAGGYSRKYASKAKNLADDMVRNTARDLLYYAVTQDAMLIFENLSRGFGRQGKRTFMAERQYTRMEDWLTAKLAYEGLPSKTYLSKTLAQYTSKTCSNCGFTITSADYDRVLEKLKKTATGWMTTINGKELKVEGQITYYNRYKRQNVVKDLSVELDRLSEESVNNDISSWTKGRSGEALSLLKKRFSHRPVQEKFVCLNCGFETHADEQAALNIARSWLFLRSQEYKKYQTNKTTGNTDKRAFVETWQSFYRKKLKEVWKPAV

SEQ ID NO: 19941 - protein, 979 aa, synthetic construct
MQEIKRINKIRRRLVKDSNTKKAGKTGPMKTLLVRVMTPDLRERLENLRKKPENIPQPISNTSRANLNKLLTDYTEMKKAILHVYWEEFQKDPVGLMSRVAQPASKKIDQNKLKPEMDEKGNLTTAGFACSQCGQPLFVYKLEQVSEKGKAYTNYFGRCNVAEHEKLIKLAQLKPEKDSDEAVTYSLGKFGQRALDFYSIHVTKESTHPVKPLAQIAGNRYASGPVGKALSDACMGTIASFLSKYQDIIIEHQKVVKGNQKRLESLRELAGKENLEYPSVTLPPQPHTKEGVDAYNEVIARVRMWVNLNLWQKLKLSRDDAKPLLRLKGFPSFPLVERQANEVDWWDMVCNVKKLINEKKEDGKVFWQNLAGYKRQEALRPYLSSEEDRKKGKKFARYQLGDLLLHLEKKHGEDWGKVYDEAWERIDKKVEGLSKHIKLEEERRSEDAQSKAALTDWLRAKASFVIEGLKEADKDEFCRCELKLQKWYGDLRGKPFAIEAENSILDISGFSKQYNCAFIWQKDGVKKLNLYLIINYFKGGKLRFKKIKPEAFEANRFYTVINKKSGEIVPMEVNFNFDDPNLIILPLAFGKRQGREFIWNDLLSLETGSLKLANGRVIEKTLYNRRTRQDEPALFVALTFERREVLDSSNIKPMNLIGVDRGENIPAVIALTDPEGCPLSRFKDSLGNPTHILRIGESYKEKQRTIQAKKEVEQRRAGGYSRKYASKAKNLADDMVRNTARDLLYYAVTQDAMLIFENLSRGFGRQGKRTFMAERQYTRMEDWLTAKLAYEGLPSKTYLSKTLAQYTSKTCSNCGFTITSADYDRMLEKLKKTATGWMTTINGKELKVEGQITYYNRYKRQNVVKDLSVELDRLSEESVNNDISSWTKGRSGEALSLLKKRFSHRPVQEKFVCLNCGFETHADEQAALNIARSWLFLRSQEYKKYQTNKTTGNTDKRAFVETWQSFYRKKLKEVWKPAV

SEQ ID NO: 19942 - protein, 979 aa, synthetic construct
MQEIKRINKIRRRLVKDSNTKKAGKTGPMKTLLVRVMTPDLRERLENLRKKPENIPQPISNTSRANLNKLLTDYTEMKKAILHVYWEEFQKDPVGLMSRVAQPASKKIDQNKLKPEMDEKGNLTTAGFACSQCGQPLFVYKLEQVSEKGKAYTNYFGRCNVAEHEKLIKLAQLKPEKDSDEAVTYSLGKFGQRALDFYSIHVTKESTHPVKPLAQIAGNRYASGPVGKALSDACMGTIASFLSKYQDIIIEHQKVVKGNQKRLESLRELAGKENLEYPSVTLPPQPHTKEGVDAYNEVIARVRMWVNLNLWQKLKLSRDDAKPLLRLKGFPSFPLVERQANEVDWWDMVCNVKKLINEKKEDGKVFWQNLAGYKRQEALRPYLSSEEDRKKGKKFARYQLGDLLLHLEKKHGEDWGKVYDEAWERIDKKVEGLSKHIKLEEERRSEDAQSKAALTDWLRAKASFVIEGLKEADKDEFCRCELKLQKWYGDLRGKPFAIEAENSILDISGFSKQYNCAFIWQKDGVKKLNLYLIINYFKGGKLRFKKIKPEAFEANRFYTVINKKSGEIVPMEVNFNFDDPNLIILPLAFGKRQGREFIWNDLLSLETGSLKLANGRVIEKTLYNRRTRQDEPALFVALTFERREVLDSSNIKPMNLIGVDRGENIPAVIALTDPEGCPLSRFKDSLGNPTHILRIGESYKEKQRTIQAKKEVEQRRAGGYSRKYASKAKNLADDMVRNTARDLLYYAVTQDAMLIFENLSRGFGRQGKRTFMAERQYTRMEDWLTAKLAYEGLPSKTYLSKTLAQYTSKTCSNCGFTITSADYDRVLEKLKKTATGWMTTINGKELKVEGQITYYNRYKRQNVVKDLSVELDRLSEESVNNDISSWDKGRSGEALSLLKKRFSHRPVQEKFVCLNCGFETHADEQAALNIARSWLFLRSQEYKKYQTNKTTGNTDKRAFVETWQSFYRKKLKEVWKPAV

SEQ ID NO: 19943 - protein, 979 aa, synthetic construct
MQEIKRINKIRRRLVKDSNTKKAGKTGPMKTLLVRVMTPDLRERLENLRKKPENIPQPISNTSRANLNKLLTDYTEMKKAILHVYWEEFQKDPVGLMSRVAQPASKKIDQNKLKPEMDEKGNLTTAGFACSQCGQPLFVYKLEQVSEKGKAYTNYFGRCNVAEHEKLIKLAQLKPEKDSDEAVTYSLGKFGQRALDFYSIHVTKESTHPVKPLAQIAGNRYASGPVGKALSDACMGTIASFLSKYQDIIIEHQKVVKGNQKRLESLRELAGKENLEYPSVTLPPQPHTKEGVDAYNEVIARVRMWVNLNLWQKLKLSRDDAKPLLRLKGFPSFPLVERQANEVDWWDMVCNVKKLINEKKEDGKVFWQNLAGYKRQEALRPYLSSEEDRKKGKKFARYQLGDLLLHLEKKHGEDWGKVYDEAWERIDKKVEGLSKHIKLEEERRSEDAQSKAALTDWLRAKASFVIEGLKEADKDEFCRCELKLQKWYGDLRGKPFAIEAENSILDISGFSKQYNCAFIWQKDGVKKLNLYLIINYFKGGKLRFKKIKPEAFEANRFYTVINKKSGEIVPMEVNFNFDDPNLIILPLAFGKRQGREFIWNDLLSLETGSLKLANGRVIEKTLYNRRTRQDEPALFVALTFERREVLDSSNIKPMNLIGVDRGENIPAVIALTDPEGCPLSRFKDSLGNPTHILRIGESYKEKQRTIQAKKEVEQRRAGGYSRKYASKAKNLADDMVRNTARDLLYYAVTQDAMLIFENLSRGFGRQGKRTFMAERQYTRMEDWLTAKLAYEGLPSKTYLSKTLAQYTSKTCSNCGFTITSADYDRVLEKLKKTATGWMTTINGKELKVEGQITYYNRYKRQNVVKDLSVELDRLSEESVNNDISSWTKGRQGEALSLLKKRFSHRPVQEKFVCLNCGFETHADEQAALNIARSWLFLRSQEYKKYQTNKTTGNTDKRAFVETWQSFYRKKLKEVWKPAV

SEQ ID NO: 19944 - protein, 979 aa, synthetic construct
MQEIKRINKIRRRLVKDSNTKKAGKTGPMKTLLVRVMTPDLRERLENLRKKPENIPQPISNTSRANLNKLLTDYTEMKKAILHVYWEEFQKDPVGLMSRVAQPASKKIDQNKLKPEMDEKGNLTTAGFACSQCGQPLFVYKLEQVSEKGKAYTNYFGRCNVAEHEKLIQLDQLKPEKDSDEAVTYSLGKFGQRALDFYSIHVTKESTHPVKPLAQIAGNRYASGPVGKALSDACMGTIASFLSKYQDIIIEHQKVVKGNQKRLESLRELAGKENLEYPSVTLPPQPHTKEGVDAYNEVIARVRMWVNLNLWQKLKLSRDDAKPLLRLKGFPSFPLVERQANEVDWWDMVCNVKKLINEKKEDGKVFWQNLAGYKRQEALRPYLSSEEDRKKGKKFARYQLGDLLLHLEKKHGEDWGKVYDEAWERIDKKVEGLSKHIKLEEERRSEDAQSKAALTDWLRAKASFVIEGLKEADKDEFCRCELKLQKWYGDLRGKPFAIEAENSILDISGFSKQYNCAFIWQKDGVKKLNLYLIINYFKGGKLRFKKIKPEAFEANRFYTVINKKSGEIVPMEVNFNFDDPNLIILPLAFGKRQGREFIWNDLLSLETGSLKLANGRVIEKTLYNRRTRQDEPALFVALTFERREVLDSSNIKPMNLIGVDRGENIPAVIALTDPEGCPLSRFKDSLGNPTHILRIGESYKEKQRTIQAKKEVEQRRAGGYSRKYASKAKNLADDMVRNTARDLLYYAVTQDAMLIFENLSRGFGRQGKRTFMAERQYTRMEDWLTAKLAYEGLPSKTYLSKTLAQYTSKTCSNCGFTITSADYDRVLEKLKKTATGWMTTINGKELKVEGQITYYNRYKRQNVVKDLSVELDRLSEESVNNDISSWTKGRSGEALSLLKKRFSHRPVQEKFVCLNCGFETHADEQAALNIARSWLFLRSQEYKKYQTNKTTGNTDKRAFVETWQSFYRKKLKEVWKPAV

SEQ ID NO: 19945 - protein, 979 aa, synthetic construct
MQEIKRINKIRRRLVKDSNTKKAGKTGPMKTLLVRVMTPDLRERLENLRKKPENIPQPISNTSRANLNKLLTDYTEMKKAILHVYWEEFQKDPVGLMSRVAQPASKKIDQNKLKPEMDEKGNLTTAGFACSQCGQPLFVYKLEQVSEKGKAYTNYFGRCNVAEHEKLIQLYQLKPEKDSDEAVTYSLGKFGQRALDFYSIHVTKESTHPVKPLAQIAGNRYASGPVGKALSDACMGTIASFLSKYQDIIIEHQKVVKGNQKRLESLRELAGKENLEYPSVTLPPQPHTKEGVDAYNEVIARVRMWVNLNLWQKLKLSRDDAKPLLRLKGFPSFPLVERQANEVDWWDMVCNVKKLINEKKEDGKVFWQNLAGYKRQEALRPYLSSEEDRKKGKKFARYQLGDLLLHLEKKHGEDWGKVYDEAWERIDKKVEGLSKHIKLEEERRSEDAQSKAALTDWLRAKASFVIEGLKEADKDEFCRCELKLQKWYGDLRGKPFAIEAENSILDISGFSKQYNCAFIWQKDGVKKLNLYLIINYFKGGKLRFKKIKPEAFEANRFYTVINKKSGEIVPMEVNFNFDDPNLIILPLAFGKRQGREFIWNDLLSLETGSLKLANGRVIEKTLYNRRTRQDEPALFVALTFERREVLDSSNIKPMNLIGVDRGENIPAVIALTDPEGCPLSRFKDSLGNPTHILRIGESYKEKQRTIQAKKEVEQRRAGGYSRKYASKAKNLADDMVRNTARDLLYYAVTQDAMLIFENLSRGFGRQGKRTFMAERQYTRMEDWLTAKLAYEGLPSKTYLSKTLAQYTSKTCSNCGFTITSADYDRVLEKLKKTATGWMTTINGKELKVEGQITYYNRYKRQNVVKDLSVELDRLSEESVNNDISSWTKGRSGEALSLLKKRFSHRPVQEKFVCLNCGFETHADEQAALNIARSWLFLRSQEYKKYQTNKTTGNTDKRAFVETWQSFYRKKLKEVWKPAV

SEQ ID NO: 19946 - protein, 979 aa, synthetic construct
MQEIKRINKIRRRLVKDSNTKKAGKTGPMKTLLVRVMTPDLRERLENLRKKPENIPQPISNTSRANLNKLLTDYTEMKKAILHVYWEEFQKDPVGLMSRVAQPASKKIDQNKLKPEMDEKGNLTTAGFACSQCGQPLFVYKLEQVSEKGKAYTNYFGRCNVAEHEKLIQLSQLKPEKDSDEAVTYSLGKFGQRALDFYSIHVTKESTHPVKPLAQIAGNRYASGPVGKALSDACMGTIASFLSKYQDIIIEHQKVVKGNQKRLESLRELAGKENLEYPSVTLPPQPHTKEGVDAYNEVIARVRMWVNLNLWQKLKLSRDDAKPLLRLKGFPSFPLVERQANEVDWWDMVCNVKKLINEKKEDGKVFWQNLAGYKRQEALRPYLSSEEDRKKGKKFARYQLGDLLLHLEKKHGEDWGKVYDEAWERIDKKVEGLSKHIKLEEERRSEDAQSKAALTDWLRAKASFVIEGLKEADKDEFCRCELKLQKWYGDLRGKPFAIEAENSILDISGFSKQYNCAFIWQKDGVKKLNLYLIINYFKGGKLRFKKIKPEAFEANRFYTVINKKSGEIVPMEVNFNFDDPNLIILPLAFGKRQGREFIWNDLLSLETGSLKLANGRVIEKTLYNRRTRQDEPALFVALTFERREVLDSSNIKPMNLIGVDRGENIPAVIALTDPEGCPLSRFKDSLGNPTHILRIGESYKEKQRTIQAKKEVEQRRAGGYSRKYASKAKNLADDMVRNTARDLLYYAVTQDAMLIFENLSRGFGRQGKRTFMAERQYTRMEDWLTAKLAYEGLPSKTYLSKTLAQYTSKTCSNCGFTITSADYDRVLEKLKKTATGWMTTINGKELKVEGQITYYNRYKRQNVVKDLSVELDRLSEESVNNDISSWTKGRSGEALSLLKKRFSHRPVQEKFVCLNCGFETHADEQAALNIARSWLFLRSQEYKKYQTNKTTGNTDKRAFVETWQSFYRKKLKEVWKPAV

SEQ ID NO: 19947 - protein, 979 aa, synthetic construct
MQEIKRINKIRRRLVKDSNTKKAGKTGPMKTLLVRVMTPDLRERLENLRKKPENIPQPISNTSRANLNKLLTDYTEMKKAILHVYWEEFQKDPVGLMSRVAQPASKKIDQNKLKPEMDEKGNLTTAGFACSQCGQPLFVYKLEQVSEKGKAYTNYFGRCNVAEHEKLIQLAQLKPEKDSDEAVTYSLGKFGQRALDFYSIHVTKESTHPVKPLAQIAGNRYASTPVGKALSDACMGTIASFLSKYQDIIIEHQKVVKGNQKRLESLRELAGKENLEYPSVTLPPQPHTKEGVDAYNEVIARVRMWVNLNLWQKLKLSRDDAKPLLRLKGFPSFPLVERQANEVDWWDMVCNVKKLINEKKEDGKVFWQNLAGYKRQEALRPYLSSEEDRKKGKKFARYQLGDLLLHLEKKHGEDWGKVYDEAWERIDKKVEGLSKHIKLEEERRSEDAQSKAALTDWLRAKASFVIEGLKEADKDEFCRCELKLQKWYGDLRGKPFAIEAENSILDISGFSKQYNCAFIWQKDGVKKLNLYLIINYFKGGKLRFKKIKPEAFEANRFYTVINKKSGEIVPMEVNFNFDDPNLIILPLAFGKRQGREFIWNDLLSLETGSLKLANGRVIEKTLYNRRTRQDEPALFVALTFERREVLDSSNIKPMNLIGVDRGENIPAVIALTDPEGCPLSRFKDSLGNPTHILRIGESYKEKQRTIQAKKEVEQRRAGGYSRKYASKAKNLADDMVRNTARDLLYYAVTQDAMLIFENLSRGFGRQGKRTFMAERQYTRMEDWLTAKLAYEGLPSKTYLSKTLAQYTSKTCSNCGFTITSADYDRVLEKLKKTATGWMTTINGKELKVEGQITYYNRYKRQNVVKDLSVELDRLSEESVNNDISSWTKGRSGEALSLLKKRFSHRPVQEKFVCLNCGFETHADEQAALNIARSWLFLRSQEYKKYQTNKTTGNTDKRAFVETWQSFYRKKLKEVWKPAV

SEQ ID NO: 19948 - protein, 979 aa, synthetic construct
MQEIKRINKIRRRLVKDSNTKKAGKTGPMKTLLVRVMTPDLRERLENLRKKPENIPQPISNTSRANLNKLLTDYTEMKKAILHVYWEEFQKDPVGLMSRVAQPASKKIDQNKLKPEMDEKGNLTTAGFACSQCGQPLFVYKLEQVSEKGKAYTNYFGRCNVAEHEKLIQLAQLKPEKDSDEAVTYSLGKFGQRALDFYSIHVTKESTHPVKPLAQIAGNRYASGPVGKALSDACMGTIASFLSKYQDIIIEHQKVVKGNQKRLESLRELAGKENLEYPSVTLPPQPHTKEGVDAYNEVIARVRTWVNLNLWQKLKLSRDDAKPLLRLKGFPSFPLVERQANEVDWWDMVCNVKKLINEKKEDGKVFWQNLAGYKRQEALRPYLSSEEDRKKGKKFARYQLGDLLLHLEKKHGEDWGKVYDEAWERIDKKVEGLSKHIKLEEERRSEDAQSKAALTDWLRAKASFVIEGLKEADKDEFCRCELKLQKWYGDLRGKPFAIEAENSILDISGFSKQYNCAFIWQKDGVKKLNLYLIINYFKGGKLRFKKIKPEAFEANRFYTVINKKSGEIVPMEVNFNFDDPNLIILPLAFGKRQGREFIWNDLLSLETGSLKLANGRVIEKTLYNRRTRQDEPALFVALTFERREVLDSSNIKPMNLIGVDRGENIPAVIALTDPEGCPLSRFKDSLGNPTHILRIGESYKEKQRTIQAKKEVEQRRAGGYSRKYASKAKNLADDMVRNTARDLLYYAVTQDAMLIFENLSRGFGRQGKRTFMAERQYTRMEDWLTAKLAYEGLPSKTYLSKTLAQYTSKTCSNCGFTITSADYDRVLEKLKKTATGWMTTINGKELKVEGQITYYNRYKRQNVVKDLSVELDRLSEESVNNDISSWTKGRSGEALSLLKKRFSHRPVQEKFVCLNCGFETHADEQAALNIARSWLFLRSQEYKKYQTNKTTGNTDKRAFVETWQSFYRKKLKEVWKPAV

SEQ ID NO: 19949 - protein, 979 aa, synthetic construct
MQEIKRINKIRRRLVKDSNTKKAGKTGPMKTLLVRVMTPDLRERLENLRKKPENIPQPISNTSRANLNKLLTDYTEMKKAILHVYWEEFQKDPVGLMSRVAQPASKKIDQNKLKPEMDEKGNLTTAGFACSQCGQPLFVYKLEQVSEKGKAYTNYFGRCNVAEHEKLIQLAQLKPEKDSDEAVTYSLGKFGQRALDFYSIHVTKESTHPVKPLAQIAGNRYASGPVGKALSDACMGTIASFLSKYQDIIIEHQKVVKGNQKRLESLRELAGKENLEYPSVTLPPQPHTKEGVDAYNEVIARVRMWVNLNLWQKLKLSRDDAKPLLRLKGFPSFPLVERQANEVDWWDMVCNVKKLINEKKEDGKVFWQNLAGYKRQEALRPYLSSEEDRKKGKKFARTQLGDLLLHLEKKHGEDWGKVYDEAWERIDKKVEGLSKHIKLEEERRSEDAQSKAALTDWLRAKASFVIEGLKEADKDEFCRCELKLQKWYGDLRGKPFAIEAENSILDISGFSKQYNCAFIWQKDGVKKLNLYLIINYFKGGKLRFKKIKPEAFEANRFYTVINKKSGEIVPMEVNFNFDDPNLIILPLAFGKRQGREFIWNDLLSLETGSLKLANGRVIEKTLYNRRTRQDEPALFVALTFERREVLDSSNIKPMNLIGVDRGENIPAVIALTDPEGCPLSRFKDSLGNPTHILRIGESYKEKQRTIQAKKEVEQRRAGGYSRKYASKAKNLADDMVRNTARDLLYYAVTQDAMLIFENLSRGFGRQGKRTFMAERQYTRMEDWLTAKLAYEGLPSKTYLSKTLAQYTSKTCSNCGFTITSADYDRVLEKLKKTATGWMTTINGKELKVEGQITYYNRYKRQNVVKDLSVELDRLSEESVNNDISSWTKGRSGEALSLLKKRFSHRPVQEKFVCLNCGFETHADEQAALNIARSWLFLRSQEYKKYQTNKTTGNTDKRAFVETWQSFYRKKLKEVWKPAV

SEQ ID NO: 19950 - protein, 979 aa, synthetic construct
MQEIKRINKIRRRLVKDSNTKKAGKTGPMKTLLVRVMTPDLRERLENLRKKPENIPQPISNTSRANLNKLLTDYTEMKKAILHVYWEEFQKDPVGLMSRVAQPASKKIDQNKLKPEMDEKGNLTTAGFACSQCGQPLFVYKLEQVSEKGKAYTNYFGRCNVAEHEKLIQLAQLKPEKDSDEAVTYSLGKFGQRALDFYSIHVTKESTHPVKPLAQIAGNRYASGPVGKALSDACMGTIASFLSKYQDIIIEHQKVVKGNQKRLESLRELAGKENLEYPSVTLPPQPHTKEGVDAYNEVIARVRMWVNLNLWQKLKLSRDDAKPLLRLKGFPSFPLVERQANEVDWWDMVCNVKKLINEKKEDGKVFWQNLAGYKRQEALRPYLSSEEDRKKGKKFARYQLGDLLLHLEKKHGEDWGKVYDEAWERIDKKVEGLSKHIKLEEERRSEDAQSKAALTDWLRAKASFVIEGLKEADKDEFCRCELKLQKWYGDLRGKPFAIEAENSILDISGFSKQYNCAFIWQKDGVKKLNLYLIINYFKGGKLRFKKIKPEAFEANRFYTVINKKSGEIVPMEVNFNFDDPNLIILPLAFGKRQGREFIWNDLLSLETGSLKLANGRVIEKTLYNRRTRQDEPALFVALTFERREVLDSSNIKPMNLIGVDRGENIPAVIALTDPEGCPLSRFKDSLGNPTHILRIGESYKEKQRTIQAKKEVEQRRAGGYSRKYASKAKNLADDMVRNTARDLLYYAVTQDAMLIFENLSRGFGRQGKRTFMAERQYTRMEDWLTAKLAYEGLPSKTYLSKTLAQYTSKTCSNCGFTITSADYDRMLEKLKKTATGWMTTINGKELKVEGQITYYNRYKRQNVVKDLSVELDRLSEESVNNDISSWTKGRSGEALSLLKKRFSHRPVQEKFVCLNCGFETHADEQAALNIARSWLFLRSQEYKKYQTNKTTGNTDKRAFVETWQSFYRKKLKEVWKPAV

SEQ ID NO: 19951 - protein, 979 aa, synthetic construct
MQEIKRINKIRRRLVKDSNTKKAGKTGPMKTLLVRVMTPDLRERLENLRKKPENIPQPISNTSRANLNKLLTDYTEMKKAILHVYWEEFQKDPVGLMSRVAQPASKKIDQNKLKPEMDEKGNLTTAGFACSQCGQPLFVYKLEQVSEKGKAYTNYFGRCNVAEHEKLIQLAQLKPEKDSDEAVTYSLGKFGQRALDFYSIHVTKESTHPVKPLAQIAGNRYASGPVGKALSDACMGTIASFLSKYQDIIIEHQKVVKGNQKRLESLRELAGKENLEYPSVTLPPQPHTKEGVDAYNEVIARVRMWVNLNLWQKLKLSRDDAKPLLRLKGFPSFPLVERQANEVDWWDMVCNVKKLINEKKEDGKVFWQNLAGYKRQEALRPYLSSEEDRKKGKKFARYQLGDLLLHLEKKHGEDWGKVYDEAWERIDKKVEGLSKHIKLEEERRSEDAQSKAALTDWLRAKASFVIEGLKEADKDEFCRCELKLQKWYGDLRGKPFAIEAENSILDISGFSKQYNCAFIWQKDGVKKLNLYLIINYFKGGKLRFKKIKPEAFEANRFYTVINKKSGEIVPMEVNFNFDDPNLIILPLAFGKRQGREFIWNDLLSLETGSLKLANGRVIEKTLYNRRTRQDEPALFVALTFERREVLDSSNIKPMNLIGVDRGENIPAVIALTDPEGCPLSRFKDSLGNPTHILRIGESYKEKQRTIQAKKEVEQRRAGGYSRKYASKAKNLADDMVRNTARDLLYYAVTQDAMLIFENLSRGFGRQGKRTFMAERQYTRMEDWLTAKLAYEGLPSKTYLSKTLAQYTSKTCSNCGFTITSADYDRVLEKLKKTATGWMTTINGKELKVEGQITYYNRYKRQNVVKDLSVELDRLSEESVNNDISSWDKGRSGEALSLLKKRFSHRPVQEKFVCLNCGFETHADEQAALNIARSWLFLRSQEYKKYQTNKTTGNTDKRAFVETWQSFYRKKLKEVWKPAV

SEQ ID NO: 19952 - protein, 979 aa, synthetic construct
MQEIKRINKIRRRLVKDSNTKKAGKTGPMKTLLVRVMTPDLRERLENLRKKPENIPQPISNTSRANLNKLLTDYTEMKKAILHVYWEEFQKDPVGLMSRVAQPASKKIDQNKLKPEMDEKGNLTTAGFACSQCGQPLFVYKLEQVSEKGKAYTNYFGRCNVAEHEKLIQLAQLKPEKDSDEAVTYSLGKFGQRALDFYSIHVTKESTHPVKPLAQIAGNRYASGPVGKALSDACMGTIASFLSKYQDIIIEHQKVVKGNQKRLESLRELAGKENLEYPSVTLPPQPHTKEGVDAYNEVIARVRMWVNLNLWQKLKLSRDDAKPLLRLKGFPSFPLVERQANEVDWWDMVCNVKKLINEKKEDGKVFWQNLAGYKRQEALRPYLSSEEDRKKGKKFARYQLGDLLLHLEKKHGEDWGKVYDEAWERIDKKVEGLSKHIKLEEERRSEDAQSKAALTDWLRAKASFVIEGLKEADKDEFCRCELKLQKWYGDLRGKPFAIEAENSILDISGFSKQYNCAFIWQKDGVKKLNLYLIINYFKGGKLRFKKIKPEAFEANRFYTVINKKSGEIVPMEVNFNFDDPNLIILPLAFGKRQGREFIWNDLLSLETGSLKLANGRVIEKTLYNRRTRQDEPALFVALTFERREVLDSSNIKPMNLIGVDRGENIPAVIALTDPEGCPLSRFKDSLGNPTHILRIGESYKEKQRTIQAKKEVEQRRAGGYSRKYASKAKNLADDMVRNTARDLLYYAVTQDAMLIFENLSRGFGRQGKRTFMAERQYTRMEDWLTAKLAYEGLPSKTYLSKTLAQYTSKTCSNCGFTITSADYDRVLEKLKKTATGWMTTINGKELKVEGQITYYNRYKRQNVVKDLSVELDRLSEESVNNDISSWTKGRQGEALSLLKKRFSHRPVQEKFVCLNCGFETHADEQAALNIARSWLFLRSQEYKKYQTNKTTGNTDKRAFVETWQSFYRKKLKEVWKPAV

SEQ ID NO: 19953 - protein, 979 aa, synthetic construct
MQEIKRINKIRRRLVKDSNTKKAGKTGPMKTLLVRVMTPDLRERLENLRKKPENIPQPISNTSRANLNKLLTDYTEMKKAILHVYWEEFQKDPVGLMSRVAQPASKKIDQNKLKPEMDEKGNLTTAGFACSQCGQPLFVYKLEQVSEKGKAYTNYFGRCNVAEHEKLILLDQLKPEKDSDEAVTYSLGKFGQRALDFYSIHVTKESTHPVKPLAQIAGNRYASTPVGKALSDACMGTIASFLSKYQDIIIEHQKVVKGNQKRLESLRELAGKENLEYPSVTLPPQPHTKEGVDAYNEVIARVRMWVNLNLWQKLKLSRDDAKPLLRLKGFPSFPLVERQANEVDWWDMVCNVKKLINEKKEDGKVFWQNLAGYKRQEALRPYLSSEEDRKKGKKFARYQLGDLLLHLEKKHGEDWGKVYDEAWERIDKKVEGLSKHIKLEEERRSEDAQSKAALTDWLRAKASFVIEGLKEADKDEFCRCELKLQKWYGDLRGKPFAIEAENSILDISGFSKQYNCAFIWQKDGVKKLNLYLIINYFKGGKLRFKKIKPEAFEANRFYTVINKKSGEIVPMEVNFNFDDPNLIILPLAFGKRQGREFIWNDLLSLETGSLKLANGRVIEKTLYNRRTRQDEPALFVALTFERREVLDSSNIKPMNLIGVDRGENIPAVIALTDPEGCPLSRFKDSLGNPTHILRIGESYKEKQRTIQAKKEVEQRRAGGYSRKYASKAKNLADDMVRNTARDLLYYAVTQDAMLIFENLSRGFGRQGKRTFMAERQYTRMEDWLTAKLAYEGLPSKTYLSKTLAQYTSKTCSNCGFTITSADYDRVLEKLKKTATGWMTTINGKELKVEGQITYYNRYKRQNVVKDLSVELDRLSEESVNNDISSWTKGRSGEALSLLKKRFSHRPVQEKFVCLNCGFETHADEQAALNIARSWLFLRSQEYKKYQTNKTTGNTDKRAFVETWQSFYRKKLKEVWKPAV

SEQ ID NO: 19954 - protein, 979 aa, synthetic construct
MQEIKRINKIRRRLVKDSNTKKAGKTGPMKTLLVRVMTPDLRERLENLRKKPENIPQPISNTSRANLNKLLTDYTEMKKAILHVYWEEFQKDPVGLMSRVAQPASKKIDQNKLKPEMDEKGNLTTAGFACSQCGQPLFVYKLEQVSEKGKAYTNYFGRCNVAEHEKLILLDQLKPEKDSDEAVTYSLGKFGQRALDFYSIHVTKESTHPVKPLAQIAGNRYASGPVGKALSDACMGTIASFLSKYQDIIIEHQKVVKGNQKRLESLRELAGKENLEYPSVTLPPQPHTKEGVDAYNEVIARVRTWVNLNLWQKLKLSRDDAKPLLRLKGFPSFPLVERQANEVDWWDMVCNVKKLINEKKEDGKVFWQNLAGYKRQEALRPYLSSEEDRKKGKKFARYQLGDLLLHLEKKHGEDWGKVYDEAWERIDKKVEGLSKHIKLEEERRSEDAQSKAALTDWLRAKASFVIEGLKEADKDEFCRCELKLQKWYGDLRGKPFAIEAENSILDISGFSKQYNCAFIWQKDGVKKLNLYLIINYFKGGKLRFKKIKPEAFEANRFYTVINKKSGEIVPMEVNFNFDDPNLIILPLAFGKRQGREFIWNDLLSLETGSLKLANGRVIEKTLYNRRTRQDEPALFVALTFERREVLDSSNIKPMNLIGVDRGENIPAVIALTDPEGCPLSRFKDSLGNPTHILRIGESYKEKQRTIQAKKEVEQRRAGGYSRKYASKAKNLADDMVRNTARDLLYYAVTQDAMLIFENLSRGFGRQGKRTFMAERQYTRMEDWLTAKLAYEGLPSKTYLSKTLAQYTSKTCSNCGFTITSADYDRVLEKLKKTATGWMTTINGKELKVEGQITYYNRYKRQNVVKDLSVELDRLSEESVNNDISSWTKGRSGEALSLLKKRFSHRPVQEKFVCLNCGFETHADEQAALNIARSWLFLRSQEYKKYQTNKTTGNTDKRAFVETWQSFYRKKLKEVWKPAV

SEQ ID NO: 19955 - protein, 979 aa, synthetic construct
MQEIKRINKIRRRLVKDSNTKKAGKTGPMKTLLVRVMTPDLRERLENLRKKPENIPQPISNTSRANLNKLLTDYTEMKKAILHVYWEEFQKDPVGLMSRVAQPASKKIDQNKLKPEMDEKGNLTTAGFACSQCGQPLFVYKLEQVSEKGKAYTNYFGRCNVAEHEKLILLDQLKPEKDSDEAVTYSLGKFGQRALDFYSIHVTKESTHPVKPLAQIAGNRYASGPVGKALSDACMGTIASFLSKYQDIIIEHQKVVKGNQKRLESLRELAGKENLEYPSVTLPPQPHTKEGVDAYNEVIARVRMWVNLNLWQKLKLSRDDAKPLLRLKGFPSFPLVERQANEVDWWDMVCNVKKLINEKKEDGKVFWQNLAGYKRQEALRPYLSSEEDRKKGKKFARTQLGDLLLHLEKKHGEDWGKVYDEAWERIDKKVEGLSKHIKLEEERRSEDAQSKAALTDWLRAKASFVIEGLKEADKDEFCRCELKLQKWYGDLRGKPFAIEAENSILDISGFSKQYNCAFIWQKDGVKKLNLYLIINYFKGGKLRFKKIKPEAFEANRFYTVINKKSGEIVPMEVNFNFDDPNLIILPLAFGKRQGREFIWNDLLSLETGSLKLANGRVIEKTLYNRRTRQDEPALFVALTFERREVLDSSNIKPMNLIGVDRGENIPAVIALTDPEGCPLSRFKDSLGNPTHILRIGESYKEKQRTIQAKKEVEQRRAGGYSRKYASKAKNLADDMVRNTARDLLYYAVTQDAMLIFENLSRGFGRQGKRTFMAERQYTRMEDWLTAKLAYEGLPSKTYLSKTLAQYTSKTCSNCGFTITSADYDRVLEKLKKTATGWMTTINGKELKVEGQITYYNRYKRQNVVKDLSVELDRLSEESVNNDISSWTKGRSGEALSLLKKRFSHRPVQEKFVCLNCGFETHADEQAALNIARSWLFLRSQEYKKYQTNKTTGNTDKRAFVETWQSFYRKKLKEVWKPAV

SEQ ID NO: 19956 - protein, 979 aa, synthetic construct
MQEIKRINKIRRRLVKDSNTKKAGKTGPMKTLLVRVMTPDLRERLENLRKKPENIPQPISNTSRANLNKLLTDYTEMKKAILHVYWEEFQKDPVGLMSRVAQPASKKIDQNKLKPEMDEKGNLTTAGFACSQCGQPLFVYKLEQVSEKGKAYTNYFGRCNVAEHEKLILLDQLKPEKDSDEAVTYSLGKFGQRALDFYSIHVTKESTHPVKPLAQIAGNRYASGPVGKALSDACMGTIASFLSKYQDIIIEHQKVVKGNQKRLESLRELAGKENLEYPSVTLPPQPHTKEGVDAYNEVIARVRMWVNLNLWQKLKLSRDDAKPLLRLKGFPSFPLVERQANEVDWWDMVCNVKKLINEKKEDGKVFWQNLAGYKRQEALRPYLSSEEDRKKGKKFARYQLGDLLLHLEKKHGEDWGKVYDEAWERIDKKVEGLSKHIKLEEERRSEDAQSKAALTDWLRAKASFVIEGLKEADKDEFCRCELKLQKWYGDLRGKPFAIEAENSILDISGFSKQYNCAFIWQKDGVKKLNLYLIINYFKGGKLRFKKIKPEAFEANRFYTVINKKSGEIVPMEVNFNFDDPNLIILPLAFGKRQGREFIWNDLLSLETGSLKLANGRVIEKTLYNRRTRQDEPALFVALTFERREVLDSSNIKPMNLIGVDRGENIPAVIALTDPEGCPLSRFKDSLGNPTHILRIGESYKEKQRTIQAKKEVEQRRAGGYSRKYASKAKNLADDMVRNTARDLLYYAVTQDAMLIFENLSRGFGRQGKRTFMAERQYTRMEDWLTAKLAYEGLPSKTYLSKTLAQYTSKTCSNCGFTITSADYDRMLEKLKKTATGWMTTINGKELKVEGQITYYNRYKRQNVVKDLSVELDRLSEESVNNDISSWTKGRSGEALSLLKKRFSHRPVQEKFVCLNCGFETHADEQAALNIARSWLFLRSQEYKKYQTNKTTGNTDKRAFVETWQSFYRKKLKEVWKPAV

SEQ ID NO: 19957 - protein, 979 aa, synthetic construct
MQEIKRINKIRRRLVKDSNTKKAGKTGPMKTLLVRVMTPDLRERLENLRKKPENIPQPISNTSRANLNKLLTDYTEMKKAILHVYWEEFQKDPVGLMSRVAQPASKKIDQNKLKPEMDEKGNLTTAGFACSQCGQPLFVYKLEQVSEKGKAYTNYFGRCNVAEHEKLILLDQLKPEKDSDEAVTYSLGKFGQRALDFYSIHVTKESTHPVKPLAQIAGNRYASGPVGKALSDACMGTIASFLSKYQDIIIEHQKVVKGNQKRLESLRELAGKENLEYPSVTLPPQPHTKEGVDAYNEVIARVRMWVNLNLWQKLKLSRDDAKPLLRLKGFPSFPLVERQANEVDWWDMVCNVKKLINEKKEDGKVFWQNLAGYKRQEALRPYLSSEEDRKKGKKFARYQLGDLLLHLEKKHGEDWGKVYDEAWERIDKKVEGLSKHIKLEEERRSEDAQSKAALTDWLRAKASFVIEGLKEADKDEFCRCELKLQKWYGDLRGKPFAIEAENSILDISGFSKQYNCAFIWQKDGVKKLNLYLIINYFKGGKLRFKKIKPEAFEANRFYTVINKKSGEIVPMEVNFNFDDPNLIILPLAFGKRQGREFIWNDLLSLETGSLKLANGRVIEKTLYNRRTRQDEPALFVALTFERREVLDSSNIKPMNLIGVDRGENIPAVIALTDPEGCPLSRFKDSLGNPTHILRIGESYKEKQRTIQAKKEVEQRRAGGYSRKYASKAKNLADDMVRNTARDLLYYAVTQDAMLIFENLSRGFGRQGKRTFMAERQYTRMEDWLTAKLAYEGLPSKTYLSKTLAQYTSKTCSNCGFTITSADYDRVLEKLKKTATGWMTTINGKELKVEGQITYYNRYKRQNVVKDLSVELDRLSEESVNNDISSWDKGRSGEALSLLKKRFSHRPVQEKFVCLNCGFETHADEQAALNIARSWLFLRSQEYKKYQTNKTTGNTDKRAFVETWQSFYRKKLKEVWKPAV

SEQ ID NO: 19958 - protein, 979 aa, synthetic construct
MQEIKRINKIRRRLVKDSNTKKAGKTGPMKTLLVRVMTPDLRERLENLRKKPENIPQPISNTSRANLNKLLTDYTEMKKAILHVYWEEFQKDPVGLMSRVAQPASKKIDQNKLKPEMDEKGNLTTAGFACSQCGQPLFVYKLEQVSEKGKAYTNYFGRCNVAEHEKLILLDQLKPEKDSDEAVTYSLGKFGQRALDFYSIHVTKESTHPVKPLAQIAGNRYASGPVGKALSDACMGTIASFLSKYQDIIIEHQKVVKGNQKRLESLRELAGKENLEYPSVTLPPQPHTKEGVDAYNEVIARVRMWVNLNLWQKLKLSRDDAKPLLRLKGFPSFPLVERQANEVDWWDMVCNVKKLINEKKEDGKVFWQNLAGYKRQEALRPYLSSEEDRKKGKKFARYQLGDLLLHLEKKHGEDWGKVYDEAWERIDKKVEGLSKHIKLEEERRSEDAQSKAALTDWLRAKASFVIEGLKEADKDEFCRCELKLQKWYGDLRGKPFAIEAENSILDISGFSKQYNCAFIWQKDGVKKLNLYLIINYFKGGKLRFKKIKPEAFEANRFYTVINKKSGEIVPMEVNFNFDDPNLIILPLAFGKRQGREFIWNDLLSLETGSLKLANGRVIEKTLYNRRTRQDEPALFVALTFERREVLDSSNIKPMNLIGVDRGENIPAVIALTDPEGCPLSRFKDSLGNPTHILRIGESYKEKQRTIQAKKEVEQRRAGGYSRKYASKAKNLADDMVRNTARDLLYYAVTQDAMLIFENLSRGFGRQGKRTFMAERQYTRMEDWLTAKLAYEGLPSKTYLSKTLAQYTSKTCSNCGFTITSADYDRVLEKLKKTATGWMTTINGKELKVEGQITYYNRYKRQNVVKDLSVELDRLSEESVNNDISSWTKGRQGEALSLLKKRFSHRPVQEKFVCLNCGFETHADEQAALNIARSWLFLRSQEYKKYQTNKTTGNTDKRAFVETWQSFYRKKLKEVWKPAV

SEQ ID NO: 19959 - protein, 979 aa, synthetic construct
MQEIKRINKIRRRLVKDSNTKKAGKTGPMKTLLVRVMTPDLRERLENLRKKPENIPQPISNTSRANLNKLLTDYTEMKKAILHVYWEEFQKDPVGLMSRVAQPASKKIDQNKLKPEMDEKGNLTTAGFACSQCGQPLFVYKLEQVSEKGKAYTNYFGRCNVAEHEKLILLYQLKPEKDSDEAVTYSLGKFGQRALDFYSIHVTKESTHPVKPLAQIAGNRYASTPVGKALSDACMGTIASFLSKYQDIIIEHQKVVKGNQKRLESLRELAGKENLEYPSVTLPPQPHTKEGVDAYNEVIARVRMWVNLNLWQKLKLSRDDAKPLLRLKGFPSFPLVERQANEVDWWDMVCNVKKLINEKKEDGKVFWQNLAGYKRQEALRPYLSSEEDRKKGKKFARYQLGDLLLHLEKKHGEDWGKVYDEAWERIDKKVEGLSKHIKLEEERRSEDAQSKAALTDWLRAKASFVIEGLKEADKDEFCRCELKLQKWYGDLRGKPFAIEAENSILDISGFSKQYNCAFIWQKDGVKKLNLYLIINYFKGGKLRFKKIKPEAFEANRFYTVINKKSGEIVPMEVNFNFDDPNLIILPLAFGKRQGREFIWNDLLSLETGSLKLANGRVIEKTLYNRRTRQDEPALFVALTFERREVLDSSNIKPMNLIGVDRGENIPAVIALTDPEGCPLSRFKDSLGNPTHILRIGESYKEKQRTIQAKKEVEQRRAGGYSRKYASKAKNLADDMVRNTARDLLYYAVTQDAMLIFENLSRGFGRQGKRTFMAERQYTRMEDWLTAKLAYEGLPSKTYLSKTLAQYTSKTCSNCGFTITSADYDRVLEKLKKTATGWMTTINGKELKVEGQITYYNRYKRQNVVKDLSVELDRLSEESVNNDISSWTKGRSGEALSLLKKRFSHRPVQEKFVCLNCGFETHADEQAALNIARSWLFLRSQEYKKYQTNKTTGNTDKRAFVETWQSFYRKKLKEVWKPAV

SEQ ID NO: 19960 - protein, 979 aa, synthetic construct
MQEIKRINKIRRRLVKDSNTKKAGKTGPMKTLLVRVMTPDLRERLENLRKKPENIPQPISNTSRANLNKLLTDYTEMKKAILHVYWEEFQKDPVGLMSRVAQPASKKIDQNKLKPEMDEKGNLTTAGFACSQCGQPLFVYKLEQVSEKGKAYTNYFGRCNVAEHEKLILLYQLKPEKDSDEAVTYSLGKFGQRALDFYSIHVTKESTHPVKPLAQIAGNRYASGPVGKALSDACMGTIASFLSKYQDIIIEHQKVVKGNQKRLESLRELAGKENLEYPSVTLPPQPHTKEGVDAYNEVIARVRTWVNLNLWQKLKLSRDDAKPLLRLKGFPSFPLVERQANEVDWWDMVCNVKKLINEKKEDGKVFWQNLAGYKRQEALRPYLSSEEDRKKGKKFARYQLGDLLLHLEKKHGEDWGKVYDEAWERIDKKVEGLSKHIKLEEERRSEDAQSKAALTDWLRAKASFVIEGLKEADKDEFCRCELKLQKWYGDLRGKPFAIEAENSILDISGFSKQYNCAFIWQKDGVKKLNLYLIINYFKGGKLRFKKIKPEAFEANRFYTVINKKSGEIVPMEVNFNFDDPNLIILPLAFGKRQGREFIWNDLLSLETGSLKLANGRVIEKTLYNRRTRQDEPALFVALTFERREVLDSSNIKPMNLIGVDRGENIPAVIALTDPEGCPLSRFKDSLGNPTHILRIGESYKEKQRTIQAKKEVEQRRAGGYSRKYASKAKNLADDMVRNTARDLLYYAVTQDAMLIFENLSRGFGRQGKRTFMAERQYTRMEDWLTAKLAYEGLPSKTYLSKTLAQYTSKTCSNCGFTITSADYDRVLEKLKKTATGWMTTINGKELKVEGQITYYNRYKRQNVVKDLSVELDRLSEESVNNDISSWTKGRSGEALSLLKKRFSHRPVQEKFVCLNCGFETHADEQAALNIARSWLFLRSQEYKKYQTNKTTGNTDKRAFVETWQSFYRKKLKEVWKPAV

SEQ ID NO: 19961 - protein, 979 aa, synthetic construct
MQEIKRINKIRRRLVKDSNTKKAGKTGPMKTLLVRVMTPDLRERLENLRKKPENIPQPISNTSRANLNKLLTDYTEMKKAILHVYWEEFQKDPVGLMSRVAQPASKKIDQNKLKPEMDEKGNLTTAGFACSQCGQPLFVYKLEQVSEKGKAYTNYFGRCNVAEHEKLILLYQLKPEKDSDEAVTYSLGKFGQRALDFYSIHVTKESTHPVKPLAQIAGNRYASGPVGKALSDACMGTIASFLSKYQDIIIEHQKVVKGNQKRLESLRELAGKENLEYPSVTLPPQPHTKEGVDAYNEVIARVRMWVNLNLWQKLKLSRDDAKPLLRLKGFPSFPLVERQANEVDWWDMVCNVKKLINEKKEDGKVFWQNLAGYKRQEALRPYLSSEEDRKKGKKFARTQLGDLLLHLEKKHGEDWGKVYDEAWERIDKKVEGLSKHIKLEEERRSEDAQSKAALTDWLRAKASFVIEGLKEADKDEFCRCELKLQKWYGDLRGKPFAIEAENSILDISGFSKQYNCAFIWQKDGVKKLNLYLIINYFKGGKLRFKKIKPEAFEANRFYTVINKKSGEIVPMEVNFNFDDPNLIILPLAFGKRQGREFIWNDLLSLETGSLKLANGRVIEKTLYNRRTRQDEPALFVALTFERREVLDSSNIKPMNLIGVDRGENIPAVIALTDPEGCPLSRFKDSLGNPTHILRIGESYKEKQRTIQAKKEVEQRRAGGYSRKYASKAKNLADDMVRNTARDLLYYAVTQDAMLIFENLSRGFGRQGKRTFMAERQYTRMEDWLTAKLAYEGLPSKTYLSKTLAQYTSKTCSNCGFTITSADYDRVLEKLKKTATGWMTTINGKELKVEGQITYYNRYKRQNVVKDLSVELDRLSEESVNNDISSWTKGRSGEALSLLKKRFSHRPVQEKFVCLNCGFETHADEQAALNIARSWLFLRSQEYKKYQTNKTTGNTDKRAFVETWQSFYRKKLKEVWKPAV

SEQ ID NO: 19962 - protein, 979 aa, synthetic construct
MQEIKRINKIRRRLVKDSNTKKAGKTGPMKTLLVRVMTPDLRERLENLRKKPENIPQPISNTSRANLNKLLTDYTEMKKAILHVYWEEFQKDPVGLMSRVAQPASKKIDQNKLKPEMDEKGNLTTAGFACSQCGQPLFVYKLEQVSEKGKAYTNYFGRCNVAEHEKLILLYQLKPEKDSDEAVTYSLGKFGQRALDFYSIHVTKESTHPVKPLAQIAGNRYASGPVGKALSDACMGTIASFLSKYQDIIIEHQKVVKGNQKRLESLRELAGKENLEYPSVTLPPQPHTKEGVDAYNEVIARVRMWVNLNLWQKLKLSRDDAKPLLRLKGFPSFPLVERQANEVDWWDMVCNVKKLINEKKEDGKVFWQNLAGYKRQEALRPYLSSEEDRKKGKKFARYQLGDLLLHLEKKHGEDWGKVYDEAWERIDKKVEGLSKHIKLEEERRSEDAQSKAALTDWLRAKASFVIEGLKEADKDEFCRCELKLQKWYGDLRGKPFAIEAENSILDISGFSKQYNCAFIWQKDGVKKLNLYLIINYFKGGKLRFKKIKPEAFEANRFYTVINKKSGEIVPMEVNFNFDDPNLIILPLAFGKRQGREFIWNDLLSLETGSLKLANGRVIEKTLYNRRTRQDEPALFVALTFERREVLDSSNIKPMNLIGVDRGENIPAVIALTDPEGCPLSRFKDSLGNPTHILRIGESYKEKQRTIQAKKEVEQRRAGGYSRKYASKAKNLADDMVRNTARDLLYYAVTQDAMLIFENLSRGFGRQGKRTFMAERQYTRMEDWLTAKLAYEGLPSKTYLSKTLAQYTSKTCSNCGFTITSADYDRMLEKLKKTATGWMTTINGKELKVEGQITYYNRYKRQNVVKDLSVELDRLSEESVNNDISSWTKGRSGEALSLLKKRFSHRPVQEKFVCLNCGFETHADEQAALNIARSWLFLRSQEYKKYQTNKTTGNTDKRAFVETWQSFYRKKLKEVWKPAV

SEQ ID NO: 19963 - protein, 979 aa, synthetic construct
MQEIKRINKIRRRLVKDSNTKKAGKTGPMKTLLVRVMTPDLRERLENLRKKPENIPQPISNTSRANLNKLLTDYTEMKKAILHVYWEEFQKDPVGLMSRVAQPASKKIDQNKLKPEMDEKGNLTTAGFACSQCGQPLFVYKLEQVSEKGKAYTNYFGRCNVAEHEKLILLYQLKPEKDSDEAVTYSLGKFGQRALDFYSIHVTKESTHPVKPLAQIAGNRYASGPVGKALSDACMGTIASFLSKYQDIIIEHQKVVKGNQKRLESLRELAGKENLEYPSVTLPPQPHTKEGVDAYNEVIARVRMWVNLNLWQKLKLSRDDAKPLLRLKGFPSFPLVERQANEVDWWDMVCNVKKLINEKKEDGKVFWQNLAGYKRQEALRPYLSSEEDRKKGKKFARYQLGDLLLHLEKKHGEDWGKVYDEAWERIDKKVEGLSKHIKLEEERRSEDAQSKAALTDWLRAKASFVIEGLKEADKDEFCRCELKLQKWYGDLRGKPFAIEAENSILDISGFSKQYNCAFIWQKDGVKKLNLYLIINYFKGGKLRFKKIKPEAFEANRFYTVINKKSGEIVPMEVNFNFDDPNLIILPLAFGKRQGREFIWNDLLSLETGSLKLANGRVIEKTLYNRRTRQDEPALFVALTFERREVLDSSNIKPMNLIGVDRGENIPAVIALTDPEGCPLSRFKDSLGNPTHILRIGESYKEKQRTIQAKKEVEQRRAGGYSRKYASKAKNLADDMVRNTARDLLYYAVTQDAMLIFENLSRGFGRQGKRTFMAERQYTRMEDWLTAKLAYEGLPSKTYLSKTLAQYTSKTCSNCGFTITSADYDRVLEKLKKTATGWMTTINGKELKVEGQITYYNRYKRQNVVKDLSVELDRLSEESVNNDISSWDKGRSGEALSLLKKRFSHRPVQEKFVCLNCGFETHADEQAALNIARSWLFLRSQEYKKYQTNKTTGNTDKRAFVETWQSFYRKKLKEVWKPAV

SEQ ID NO: 19964 - protein, 979 aa, synthetic construct
MQEIKRINKIRRRLVKDSNTKKAGKTGPMKTLLVRVMTPDLRERLENLRKKPENIPQPISNTSRANLNKLLTDYTEMKKAILHVYWEEFQKDPVGLMSRVAQPASKKIDQNKLKPEMDEKGNLTTAGFACSQCGQPLFVYKLEQVSEKGKAYTNYFGRCNVAEHEKLILLYQLKPEKDSDEAVTYSLGKFGQRALDFYSIHVTKESTHPVKPLAQIAGNRYASGPVGKALSDACMGTIASFLSKYQDIIIEHQKVVKGNQKRLESLRELAGKENLEYPSVTLPPQPHTKEGVDAYNEVIARVRMWVNLNLWQKLKLSRDDAKPLLRLKGFPSFPLVERQANEVDWWDMVCNVKKLINEKKEDGKVFWQNLAGYKRQEALRPYLSSEEDRKKGKKFARYQLGDLLLHLEKKHGEDWGKVYDEAWERIDKKVEGLSKHIKLEEERRSEDAQSKAALTDWLRAKASFVIEGLKEADKDEFCRCELKLQKWYGDLRGKPFAIEAENSILDISGFSKQYNCAFIWQKDGVKKLNLYLIINYFKGGKLRFKKIKPEAFEANRFYTVINKKSGEIVPMEVNFNFDDPNLIILPLAFGKRQGREFIWNDLLSLETGSLKLANGRVIEKTLYNRRTRQDEPALFVALTFERREVLDSSNIKPMNLIGVDRGENIPAVIALTDPEGCPLSRFKDSLGNPTHILRIGESYKEKQRTIQAKKEVEQRRAGGYSRKYASKAKNLADDMVRNTARDLLYYAVTQDAMLIFENLSRGFGRQGKRTFMAERQYTRMEDWLTAKLAYEGLPSKTYLSKTLAQYTSKTCSNCGFTITSADYDRVLEKLKKTATGWMTTINGKELKVEGQITYYNRYKRQNVVKDLSVELDRLSEESVNNDISSWTKGRQGEALSLLKKRFSHRPVQEKFVCLNCGFETHADEQAALNIARSWLFLRSQEYKKYQTNKTTGNTDKRAFVETWQSFYRKKLKEVWKPAV

SEQ ID NO: 19965 - protein, 979 aa, synthetic construct
MQEIKRINKIRRRLVKDSNTKKAGKTGPMKTLLVRVMTPDLRERLENLRKKPENIPQPISNTSRANLNKLLTDYTEMKKAILHVYWEEFQKDPVGLMSRVAQPASKKIDQNKLKPEMDEKGNLTTAGFACSQCGQPLFVYKLEQVSEKGKAYTNYFGRCNVAEHEKLILLSQLKPEKDSDEAVTYSLGKFGQRALDFYSIHVTKESTHPVKPLAQIAGNRYASTPVGKALSDACMGTIASFLSKYQDIIIEHQKVVKGNQKRLESLRELAGKENLEYPSVTLPPQPHTKEGVDAYNEVIARVRMWVNLNLWQKLKLSRDDAKPLLRLKGFPSFPLVERQANEVDWWDMVCNVKKLINEKKEDGKVFWQNLAGYKRQEALRPYLSSEEDRKKGKKFARYQLGDLLLHLEKKHGEDWGKVYDEAWERIDKKVEGLSKHIKLEEERRSEDAQSKAALTDWLRAKASFVIEGLKEADKDEFCRCELKLQKWYGDLRGKPFAIEAENSILDISGFSKQYNCAFIWQKDGVKKLNLYLIINYFKGGKLRFKKIKPEAFEANRFYTVINKKSGEIVPMEVNFNFDDPNLIILPLAFGKRQGREFIWNDLLSLETGSLKLANGRVIEKTLYNRRTRQDEPALFVALTFERREVLDSSNIKPMNLIGVDRGENIPAVIALTDPEGCPLSRFKDSLGNPTHILRIGESYKEKQRTIQAKKEVEQRRAGGYSRKYASKAKNLADDMVRNTARDLLYYAVTQDAMLIFENLSRGFGRQGKRTFMAERQYTRMEDWLTAKLAYEGLPSKTYLSKTLAQYTSKTCSNCGFTITSADYDRVLEKLKKTATGWMTTINGKELKVEGQITYYNRYKRQNVVKDLSVELDRLSEESVNNDISSWTKGRSGEALSLLKKRFSHRPVQEKFVCLNCGFETHADEQAALNIARSWLFLRSQEYKKYQTNKTTGNTDKRAFVETWQSFYRKKLKEVWKPAV

SEQ ID NO: 19966 - protein, 979 aa, synthetic construct
MQEIKRINKIRRRLVKDSNTKKAGKTGPMKTLLVRVMTPDLRERLENLRKKPENIPQPISNTSRANLNKLLTDYTEMKKAILHVYWEEFQKDPVGLMSRVAQPASKKIDQNKLKPEMDEKGNLTTAGFACSQCGQPLFVYKLEQVSEKGKAYTNYFGRCNVAEHEKLILLSQLKPEKDSDEAVTYSLGKFGQRALDFYSIHVTKESTHPVKPLAQIAGNRYASGPVGKALSDACMGTIASFLSKYQDIIIEHQKVVKGNQKRLESLRELAGKENLEYPSVTLPPQPHTKEGVDAYNEVIARVRTWVNLNLWQKLKLSRDDAKPLLRLKGFPSFPLVERQANEVDWWDMVCNVKKLINEKKEDGKVFWQNLAGYKRQEALRPYLSSEEDRKKGKKFARYQLGDLLLHLEKKHGEDWGKVYDEAWERIDKKVEGLSKHIKLEEERRSEDAQSKAALTDWLRAKASFVIEGLKEADKDEFCRCELKLQKWYGDLRGKPFAIEAENSILDISGFSKQYNCAFIWQKDGVKKLNLYLIINYFKGGKLRFKKIKPEAFEANRFYTVINKKSGEIVPMEVNFNFDDPNLIILPLAFGKRQGREFIWNDLLSLETGSLKLANGRVIEKTLYNRRTRQDEPALFVALTFERREVLDSSNIKPMNLIGVDRGENIPAVIALTDPEGCPLSRFKDSLGNPTHILRIGESYKEKQRTIQAKKEVEQRRAGGYSRKYASKAKNLADDMVRNTARDLLYYAVTQDAMLIFENLSRGFGRQGKRTFMAERQYTRMEDWLTAKLAYEGLPSKTYLSKTLAQYTSKTCSNCGFTITSADYDRVLEKLKKTATGWMTTINGKELKVEGQITYYNRYKRQNVVKDLSVELDRLSEESVNNDISSWTKGRSGEALSLLKKRFSHRPVQEKFVCLNCGFETHADEQAALNIARSWLFLRSQEYKKYQTNKTTGNTDKRAFVETWQSFYRKKLKEVWKPAV

SEQ ID NO: 19967 - protein, 979 aa, synthetic construct
MQEIKRINKIRRRLVKDSNTKKAGKTGPMKTLLVRVMTPDLRERLENLRKKPENIPQPISNTSRANLNKLLTDYTEMKKAILHVYWEEFQKDPVGLMSRVAQPASKKIDQNKLKPEMDEKGNLTTAGFACSQCGQPLFVYKLEQVSEKGKAYTNYFGRCNVAEHEKLILLSQLKPEKDSDEAVTYSLGKFGQRALDFYSIHVTKESTHPVKPLAQIAGNRYASGPVGKALSDACMGTIASFLSKYQDIIIEHQKVVKGNQKRLESLRELAGKENLEYPSVTLPPQPHTKEGVDAYNEVIARVRMWVNLNLWQKLKLSRDDAKPLLRLKGFPSFPLVERQANEVDWWDMVCNVKKLINEKKEDGKVFWQNLAGYKRQEALRPYLSSEEDRKKGKKFARTQLGDLLLHLEKKHGEDWGKVYDEAWERIDKKVEGLSKHIKLEEERRSEDAQSKAALTDWLRAKASFVIEGLKEADKDEFCRCELKLQKWYGDLRGKPFAIEAENSILDISGFSKQYNCAFIWQKDGVKKLNLYLIINYFKGGKLRFKKIKPEAFEANRFYTVINKKSGEIVPMEVNFNFDDPNLIILPLAFGKRQGREFIWNDLLSLETGSLKLANGRVIEKTLYNRRTRQDEPALFVALTFERREVLDSSNIKPMNLIGVDRGENIPAVIALTDPEGCPLSRFKDSLGNPTHILRIGESYKEKQRTIQAKKEVEQRRAGGYSRKYASKAKNLADDMVRNTARDLLYYAVTQDAMLIFENLSRGFGRQGKRTFMAERQYTRMEDWLTAKLAYEGLPSKTYLSKTLAQYTSKTCSNCGFTITSADYDRVLEKLKKTATGWMTTINGKELKVEGQITYYNRYKRQNVVKDLSVELDRLSEESVNNDISSWTKGRSGEALSLLKKRFSHRPVQEKFVCLNCGFETHADEQAALNIARSWLFLRSQEYKKYQTNKTTGNTDKRAFVETWQSFYRKKLKEVWKPAV

SEQ ID NO: 19968 - protein, 979 aa, synthetic construct
MQEIKRINKIRRRLVKDSNTKKAGKTGPMKTLLVRVMTPDLRERLENLRKKPENIPQPISNTSRANLNKLLTDYTEMKKAILHVYWEEFQKDPVGLMSRVAQPASKKIDQNKLKPEMDEKGNLTTAGFACSQCGQPLFVYKLEQVSEKGKAYTNYFGRCNVAEHEKLILLSQLKPEKDSDEAVTYSLGKFGQRALDFYSIHVTKESTHPVKPLAQIAGNRYASGPVGKALSDACMGTIASFLSKYQDIIIEHQKVVKGNQKRLESLRELAGKENLEYPSVTLPPQPHTKEGVDAYNEVIARVRMWVNLNLWQKLKLSRDDAKPLLRLKGFPSFPLVERQANEVDWWDMVCNVKKLINEKKEDGKVFWQNLAGYKRQEALRPYLSSEEDRKKGKKFARYQLGDLLLHLEKKHGEDWGKVYDEAWERIDKKVEGLSKHIKLEEERRSEDAQSKAALTDWLRAKASFVIEGLKEADKDEFCRCELKLQKWYGDLRGKPFAIEAENSILDISGFSKQYNCAFIWQKDGVKKLNLYLIINYFKGGKLRFKKIKPEAFEANRFYTVINKKSGEIVPMEVNFNFDDPNLIILPLAFGKRQGREFIWNDLLSLETGSLKLANGRVIEKTLYNRRTRQDEPALFVALTFERREVLDSSNIKPMNLIGVDRGENIPAVIALTDPEGCPLSRFKDSLGNPTHILRIGESYKEKQRTIQAKKEVEQRRAGGYSRKYASKAKNLADDMVRNTARDLLYYAVTQDAMLIFENLSRGFGRQGKRTFMAERQYTRMEDWLTAKLAYEGLPSKTYLSKTLAQYTSKTCSNCGFTITSADYDRMLEKLKKTATGWMTTINGKELKVEGQITYYNRYKRQNVVKDLSVELDRLSEESVNNDISSWTKGRSGEALSLLKKRFSHRPVQEKFVCLNCGFETHADEQAALNIARSWLFLRSQEYKKYQTNKTTGNTDKRAFVETWQSFYRKKLKEVWKPAV

SEQ ID NO: 19969 - protein, 979 aa, synthetic construct
MQEIKRINKIRRRLVKDSNTKKAGKTGPMKTLLVRVMTPDLRERLENLRKKPENIPQPISNTSRANLNKLLTDYTEMKKAILHVYWEEFQKDPVGLMSRVAQPASKKIDQNKLKPEMDEKGNLTTAGFACSQCGQPLFVYKLEQVSEKGKAYTNYFGRCNVAEHEKLILLSQLKPEKDSDEAVTYSLGKFGQRALDFYSIHVTKESTHPVKPLAQIAGNRYASGPVGKALSDACMGTIASFLSKYQDIIIEHQKVVKGNQKRLESLRELAGKENLEYPSVTLPPQPHTKEGVDAYNEVIARVRMWVNLNLWQKLKLSRDDAKPLLRLKGFPSFPLVERQANEVDWWDMVCNVKKLINEKKEDGKVFWQNLAGYKRQEALRPYLSSEEDRKKGKKFARYQLGDLLLHLEKKHGEDWGKVYDEAWERIDKKVEGLSKHIKLEEERRSEDAQSKAALTDWLRAKASFVIEGLKEADKDEFCRCELKLQKWYGDLRGKPFAIEAENSILDISGFSKQYNCAFIWQKDGVKKLNLYLIINYFKGGKLRFKKIKPEAFEANRFYTVINKKSGEIVPMEVNFNFDDPNLIILPLAFGKRQGREFIWNDLLSLETGSLKLANGRVIEKTLYNRRTRQDEPALFVALTFERREVLDSSNIKPMNLIGVDRGENIPAVIALTDPEGCPLSRFKDSLGNPTHILRIGESYKEKQRTIQAKKEVEQRRAGGYSRKYASKAKNLADDMVRNTARDLLYYAVTQDAMLIFENLSRGFGRQGKRTFMAERQYTRMEDWLTAKLAYEGLPSKTYLSKTLAQYTSKTCSNCGFTITSADYDRVLEKLKKTATGWMTTINGKELKVEGQITYYNRYKRQNVVKDLSVELDRLSEESVNNDISSWDKGRSGEALSLLKKRFSHRPVQEKFVCLNCGFETHADEQAALNIARSWLFLRSQEYKKYQTNKTTGNTDKRAFVETWQSFYRKKLKEVWKPAV

SEQ ID NO: 19970 - protein, 979 aa, synthetic construct
MQEIKRINKIRRRLVKDSNTKKAGKTGPMKTLLVRVMTPDLRERLENLRKKPENIPQPISNTSRANLNKLLTDYTEMKKAILHVYWEEFQKDPVGLMSRVAQPASKKIDQNKLKPEMDEKGNLTTAGFACSQCGQPLFVYKLEQVSEKGKAYTNYFGRCNVAEHEKLILLSQLKPEKDSDEAVTYSLGKFGQRALDFYSIHVTKESTHPVKPLAQIAGNRYASGPVGKALSDACMGTIASFLSKYQDIIIEHQKVVKGNQKRLESLRELAGKENLEYPSVTLPPQPHTKEGVDAYNEVIARVRMWVNLNLWQKLKLSRDDAKPLLRLKGFPSFPLVERQANEVDWWDMVCNVKKLINEKKEDGKVFWQNLAGYKRQEALRPYLSSEEDRKKGKKFARYQLGDLLLHLEKKHGEDWGKVYDEAWERIDKKVEGLSKHIKLEEERRSEDAQSKAALTDWLRAKASFVIEGLKEADKDEFCRCELKLQKWYGDLRGKPFAIEAENSILDISGFSKQYNCAFIWQKDGVKKLNLYLIINYFKGGKLRFKKIKPEAFEANRFYTVINKKSGEIVPMEVNFNFDDPNLIILPLAFGKRQGREFIWNDLLSLETGSLKLANGRVIEKTLYNRRTRQDEPALFVALTFERREVLDSSNIKPMNLIGVDRGENIPAVIALTDPEGCPLSRFKDSLGNPTHILRIGESYKEKQRTIQAKKEVEQRRAGGYSRKYASKAKNLADDMVRNTARDLLYYAVTQDAMLIFENLSRGFGRQGKRTFMAERQYTRMEDWLTAKLAYEGLPSKTYLSKTLAQYTSKTCSNCGFTITSADYDRVLEKLKKTATGWMTTINGKELKVEGQITYYNRYKRQNVVKDLSVELDRLSEESVNNDISSWTKGRQGEALSLLKKRFSHRPVQEKFVCLNCGFETHADEQAALNIARSWLFLRSQEYKKYQTNKTTGNTDKRAFVETWQSFYRKKLKEVWKPAV

SEQ ID NO: 19971 - protein, 979 aa, synthetic construct
MQEGKRINKIRRRLVKDSNTKKAGKTGPMKTLLVPVMTPDLRERLENLRKKPENIPQPISNTSRANLNKLLTDYTEMKKAILHVYWEEFQKDPVGLMSRVAQPASKKIDQNKLKPEMDEKGNLTTAGFACSQCGQPLFVYKLEQVSEKGKAYTNYFGRCNVAEHEKLILLAQLKPEKDSDEAVTYSLGKFGQRALDFYSIHVTKESTHPVKPLAQIAGNRYASGPVGKALSDACMGTIASFLSKYQDIIIEHQKVVKGNQKRLESLRELAGKENLEYPSVTLPPQPHTKEGVDAYNEVIARVRMWVNLNLWQKLKLSRDDAKPLLRLKGFPSFPLVERQANEVDWWDMVCNVKKLINEKKEDGKVFWQNLAGYKRQEALRPYLSSEEDRKKGKKFARYQLGDLLLHLEKKHGEDWGKVYDEAWERIDKKVEGLSKHIKLEEERRSEDAQSKAALTDWLRAKASFVIEGLKEADKDEFCRCELKLQKWYGDLRGKPFAIEAENSILDISGFSKQYNCAFIWQKDGVKKLNLYLIINYFKGGKLRFKKIKPEAFEANRFYTVINKKSGEIVPMEVNFNFDDPNLIILPLAFGKRQGREFIWNDLLSLETGSLKLANGRVIEKTLYNRRTRQDEPALFVALTFERREVLDSSNIKPMNLIGVDRGENIPAVIALTDPEGCPLSRFKDSLGNPTHILRIGESYKEKQRTIQAKKEVEQRRAGGYSRKYASKAKNLADDMVRNTARDLLYYAVTQDAMLIFENLSRGFGRQGKRTFMAERQYTRMEDWLTAKLAYEGLPSKTYLSKTLAQYTSKTCSNCGFTITSADYDRVLEKLKKTATGWMTTINGKELKVEGQITYYNRYKRQNVVKDLSVELDRLSEESVNNDISSWTKGRSGEALSLLKKRFSHRPVQEKFVCLNCGFETHADEQAALNIARSWLFLRSQEYKKYQTNKTTGNTDKRAFVETWQSFYRKKLKEVWKPAV

SEQ ID NO: 19972 - protein, 979 aa, synthetic construct
MQEIKRINKIRRRLVKDSNTKKAGKTGPMKTLLVRVMTPDLRERLENLRKKPENIPQPISNTSRANLNKLLTDYTEMKKAILHVYWEEFQKDPVGLMSRVAQPASKKIDQNKLKPEMDEKGNLTTAGFACSQCGQPLFVYKLEQVSEKGKAYTNYFGRCNVAEHEKLILLAQLKPEKDSDEAVTYSLGKFGQRALDFYSIHVTKESTHPVKPLAQIAGNRYASTPVGKALSDACMGTIASFLSKYQDIIIEHQKVVKGNQKRLESLRELAGKENLEYPSVTLPPQPHTKEGVDAYNEVIARVRTWVNLNLWQKLKLSRDDAKPLLRLKGFPSFPLVERQANEVDWWDMVCNVKKLINEKKEDGKVFWQNLAGYKRQEALRPYLSSEEDRKKGKKFARYQLGDLLLHLEKKHGEDWGKVYDEAWERIDKKVEGLSKHIKLEEERRSEDAQSKAALTDWLRAKASFVIEGLKEADKDEFCRCELKLQKWYGDLRGKPFAIEAENSILDISGFSKQYNCAFIWQKDGVKKLNLYLIINYFKGGKLRFKKIKPEAFEANRFYTVINKKSGEIVPMEVNFNFDDPNLIILPLAFGKRQGREFIWNDLLSLETGSLKLANGRVIEKTLYNRRTRQDEPALFVALTFERREVLDSSNIKPMNLIGVDRGENIPAVIALTDPEGCPLSRFKDSLGNPTHILRIGESYKEKQRTIQAKKEVEQRRAGGYSRKYASKAKNLADDMVRNTARDLLYYAVTQDAMLIFENLSRGFGRQGKRTFMAERQYTRMEDWLTAKLAYEGLPSKTYLSKTLAQYTSKTCSNCGFTITSADYDRVLEKLKKTATGWMTTINGKELKVEGQITYYNRYKRQNVVKDLSVELDRLSEESVNNDISSWTKGRSGEALSLLKKRFSHRPVQEKFVCLNCGFETHADEQAALNIARSWLFLRSQEYKKYQTNKTTGNTDKRAFVETWQSFYRKKLKEVWKPAV

SEQ ID NO: 19973 - protein, 979 aa, synthetic construct
MQEIKRINKIRRRLVKDSNTKKAGKTGPMKTLLVRVMTPDLRERLENLRKKPENIPQPISNTSRANLNKLLTDYTEMKKAILHVYWEEFQKDPVGLMSRVAQPASKKIDQNKLKPEMDEKGNLTTAGFACSQCGQPLFVYKLEQVSEKGKAYTNYFGRCNVAEHEKLILLAQLKPEKDSDEAVTYSLGKFGQRALDFYSIHVTKESTHPVKPLAQIAGNRYASTPVGKALSDACMGTIASFLSKYQDIIIEHQKVVKGNQKRLESLRELAGKENLEYPSVTLPPQPHTKEGVDAYNEVIARVRMWVNLNLWQKLKLSRDDAKPLLRLKGFPSFPLVERQANEVDWWDMVCNVKKLINEKKEDGKVFWQNLAGYKRQEALRPYLSSEEDRKKGKKFARTQLGDLLLHLEKKHGEDWGKVYDEAWERIDKKVEGLSKHIKLEEERRSEDAQSKAALTDWLRAKASFVIEGLKEADKDEFCRCELKLQKWYGDLRGKPFAIEAENSILDISGFSKQYNCAFIWQKDGVKKLNLYLIINYFKGGKLRFKKIKPEAFEANRFYTVINKKSGEIVPMEVNFNFDDPNLIILPLAFGKRQGREFIWNDLLSLETGSLKLANGRVIEKTLYNRRTRQDEPALFVALTFERREVLDSSNIKPMNLIGVDRGENIPAVIALTDPEGCPLSRFKDSLGNPTHILRIGESYKEKQRTIQAKKEVEQRRAGGYSRKYASKAKNLADDMVRNTARDLLYYAVTQDAMLIFENLSRGFGRQGKRTFMAERQYTRMEDWLTAKLAYEGLPSKTYLSKTLAQYTSKTCSNCGFTITSADYDRVLEKLKKTATGWMTTINGKELKVEGQITYYNRYKRQNVVKDLSVELDRLSEESVNNDISSWTKGRSGEALSLLKKRFSHRPVQEKFVCLNCGFETHADEQAALNIARSWLFLRSQEYKKYQTNKTTGNTDKRAFVETWQSFYRKKLKEVWKPAV

SEQ ID NO: 19974 - protein, 979 aa, synthetic construct
MQEIKRINKIRRRLVKDSNTKKAGKTGPMKTLLVRVMTPDLRERLENLRKKPENIPQPISNTSRANLNKLLTDYTEMKKAILHVYWEEFQKDPVGLMSRVAQPASKKIDQNKLKPEMDEKGNLTTAGFACSQCGQPLFVYKLEQVSEKGKAYTNYFGRCNVAEHEKLILLAQLKPEKDSDEAVTYSLGKFGQRALDFYSIHVTKESTHPVKPLAQIAGNRYASTPVGKALSDACMGTIASFLSKYQDIIIEHQKVVKGNQKRLESLRELAGKENLEYPSVTLPPQPHTKEGVDAYNEVIARVRMWVNLNLWQKLKLSRDDAKPLLRLKGFPSFPLVERQANEVDWWDMVCNVKKLINEKKEDGKVFWQNLAGYKRQEALRPYLSSEEDRKKGKKFARYQLGDLLLHLEKKHGEDWGKVYDEAWERIDKKVEGLSKHIKLEEERRSEDAQSKAALTDWLRAKASFVIEGLKEADKDEFCRCELKLQKWYGDLRGKPFAIEAENSILDISGFSKQYNCAFIWQKDGVKKLNLYLIINYFKGGKLRFKKIKPEAFEANRFYTVINKKSGEIVPMEVNFNFDDPNLIILPLAFGKRQGREFIWNDLLSLETGSLKLANGRVIEKTLYNRRTRQDEPALFVALTFERREVLDSSNIKPMNLIGVDRGENIPAVIALTDPEGCPLSRFKDSLGNPTHILRIGESYKEKQRTIQAKKEVEQRRAGGYSRKYASKAKNLADDMVRNTARDLLYYAVTQDAMLIFENLSRGFGRQGKRTFMAERQYTRMEDWLTAKLAYEGLPSKTYLSKTLAQYTSKTCSNCGFTITSADYDRMLEKLKKTATGWMTTINGKELKVEGQITYYNRYKRQNVVKDLSVELDRLSEESVNNDISSWTKGRSGEALSLLKKRFSHRPVQEKFVCLNCGFETHADEQAALNIARSWLFLRSQEYKKYQTNKTTGNTDKRAFVETWQSFYRKKLKEVWKPAV

SEQ ID NO: 19975 - protein, 979 aa, synthetic construct
MQEIKRINKIRRRLVKDSNTKKAGKTGPMKTLLVRVMTPDLRERLENLRKKPENIPQPISNTSRANLNKLLTDYTEMKKAILHVYWEEFQKDPVGLMSRVAQPASKKIDQNKLKPEMDEKGNLTTAGFACSQCGQPLFVYKLEQVSEKGKAYTNYFGRCNVAEHEKLILLAQLKPEKDSDEAVTYSLGKFGQRALDFYSIHVTKESTHPVKPLAQIAGNRYASTPVGKALSDACMGTIASFLSKYQDIIIEHQKVVKGNQKRLESLRELAGKENLEYPSVTLPPQPHTKEGVDAYNEVIARVRMWVNLNLWQKLKLSRDDAKPLLRLKGFPSFPLVERQANEVDWWDMVCNVKKLINEKKEDGKVFWQNLAGYKRQEALRPYLSSEEDRKKGKKFARYQLGDLLLHLEKKHGEDWGKVYDEAWERIDKKVEGLSKHIKLEEERRSEDAQSKAALTDWLRAKASFVIEGLKEADKDEFCRCELKLQKWYGDLRGKPFAIEAENSILDISGFSKQYNCAFIWQKDGVKKLNLYLIINYFKGGKLRFKKIKPEAFEANRFYTVINKKSGEIVPMEVNFNFDDPNLIILPLAFGKRQGREFIWNDLLSLETGSLKLANGRVIEKTLYNRRTRQDEPALFVALTFERREVLDSSNIKPMNLIGVDRGENIPAVIALTDPEGCPLSRFKDSLGNPTHILRIGESYKEKQRTIQAKKEVEQRRAGGYSRKYASKAKNLADDMVRNTARDLLYYAVTQDAMLIFENLSRGFGRQGKRTFMAERQYTRMEDWLTAKLAYEGLPSKTYLSKTLAQYTSKTCSNCGFTITSADYDRVLEKLKKTATGWMTTINGKELKVEGQITYYNRYKRQNVVKDLSVELDRLSEESVNNDISSWDKGRSGEALSLLKKRFSHRPVQEKFVCLNCGFETHADEQAALNIARSWLFLRSQEYKKYQTNKTTGNTDKRAFVETWQSFYRKKLKEVWKPAV

SEQ ID NO: 19976 - protein, 979 aa, synthetic construct
MQEIKRINKIRRRLVKDSNTKKAGKTGPMKTLLVRVMTPDLRERLENLRKKPENIPQPISNTSRANLNKLLTDYTEMKKAILHVYWEEFQKDPVGLMSRVAQPASKKIDQNKLKPEMDEKGNLTTAGFACSQCGQPLFVYKLEQVSEKGKAYTNYFGRCNVAEHEKLILLAQLKPEKDSDEAVTYSLGKFGQRALDFYSIHVTKESTHPVKPLAQIAGNRYASTPVGKALSDACMGTIASFLSKYQDIIIEHQKVVKGNQKRLESLRELAGKENLEYPSVTLPPQPHTKEGVDAYNEVIARVRMWVNLNLWQKLKLSRDDAKPLLRLKGFPSFPLVERQANEVDWWDMVCNVKKLINEKKEDGKVFWQNLAGYKRQEALRPYLSSEEDRKKGKKFARYQLGDLLLHLEKKHGEDWGKVYDEAWERIDKKVEGLSKHIKLEEERRSEDAQSKAALTDWLRAKASFVIEGLKEADKDEFCRCELKLQKWYGDLRGKPFAIEAENSILDISGFSKQYNCAFIWQKDGVKKLNLYLIINYFKGGKLRFKKIKPEAFEANRFYTVINKKSGEIVPMEVNFNFDDPNLIILPLAFGKRQGREFIWNDLLSLETGSLKLANGRVIEKTLYNRRTRQDEPALFVALTFERREVLDSSNIKPMNLIGVDRGENIPAVIALTDPEGCPLSRFKDSLGNPTHILRIGESYKEKQRTIQAKKEVEQRRAGGYSRKYASKAKNLADDMVRNTARDLLYYAVTQDAMLIFENLSRGFGRQGKRTFMAERQYTRMEDWLTAKLAYEGLPSKTYLSKTLAQYTSKTCSNCGFTITSADYDRVLEKLKKTATGWMTTINGKELKVEGQITYYNRYKRQNVVKDLSVELDRLSEESVNNDISSWTKGRQGEALSLLKKRFSHRPVQEKFVCLNCGFETHADEQAALNIARSWLFLRSQEYKKYQTNKTTGNTDKRAFVETWQSFYRKKLKEVWKPAV

SEQ ID NO: 19977 - protein, 980 aa, synthetic construct
MQEIGKRINKIRRRLVKDSNTKKAGKTGPMKTLLVPVMTPDLRERLENLRKKPENIPQPISNTSRANLNKLLTDYTEMKKAILHVYWEEFQKDPVGLMSRVAQPASKKIDQNKLKPEMDEKGNLTTAGFACSQCGQPLFVYKLEQVSEKGKAYTNYFGRCNVAEHEKLILLAQLKPEKDSDEAVTYSLGKFGQRALDFYSIHVTKESTHPVKPLAQIAGNRYASGPVGKALSDACMGTIASFLSKYQDIIIEHQKVVKGNQKRLESLRELAGKENLEYPSVTLPPQPHTKEGVDAYNEVIARVRMWVNLNLWQKLKLSRDDAKPLLRLKGFPSFPLVERQANEVDWWDMVCNVKKLINEKKEDGKVFWQNLAGYKRQEALRPYLSSEEDRKKGKKFARYQLGDLLLHLEKKHGEDWGKVYDEAWERIDKKVEGLSKHIKLEEERRSEDAQSKAALTDWLRAKASFVIEGLKEADKDEFCRCELKLQKWYGDLRGKPFAIEAENSILDISGFSKQYNCAFIWQKDGVKKLNLYLIINYFKGGKLRFKKIKPEAFEANRFYTVINKKSGEIVPMEVNFNFDDPNLIILPLAFGKRQGREFIWNDLLSLETGSLKLANGRVIEKTLYNRRTRQDEPALFVALTFERREVLDSSNIKPMNLIGVDRGENIPAVIALTDPEGCPLSRFKDSLGNPTHILRIGESYKEKQRTIQAKKEVEQRRAGGYSRKYASKAKNLADDMVRNTARDLLYYAVTQDAMLIFENLSRGFGRQGKRTFMAERQYTRMEDWLTAKLAYEGLPSKTYLSKTLAQYTSKTCSNCGFTITSADYDRVLEKLKKTATGWMTTINGKELKVEGQITYYNRYKRQNVVKDLSVELDRLSEESVNNDISSWTKGRSGEALSLLKKRFSHRPVQEKFVCLNCGFETHADEQAALNIARSWLFLRSQEYKKYQTNKTTGNTDKRAFVETWQSFYRKKLKEVWKPAV

SEQ ID NO: 19978 - protein, 980 aa, synthetic construct
MQEGKRINKIRRRLVKDSNTKKAGKTRGPMKTLLVRVMTPDLRERLENLRKKPENIPQPISNTSRANLNKLLTDYTEMKKAILHVYWEEFQKDPVGLMSRVAQPASKKIDQNKLKPEMDEKGNLTTAGFACSQCGQPLFVYKLEQVSEKGKAYTNYFGRCNVAEHEKLILLAQLKPEKDSDEAVTYSLGKFGQRALDFYSIHVTKESTHPVKPLAQIAGNRYASGPVGKALSDACMGTIASFLSKYQDIIIEHQKVVKGNQKRLESLRELAGKENLEYPSVTLPPQPHTKEGVDAYNEVIARVRMWVNLNLWQKLKLSRDDAKPLLRLKGFPSFPLVERQANEVDWWDMVCNVKKLINEKKEDGKVFWQNLAGYKRQEALRPYLSSEEDRKKGKKFARYQLGDLLLHLEKKHGEDWGKVYDEAWERIDKKVEGLSKHIKLEEERRSEDAQSKAALTDWLRAKASFVIEGLKEADKDEFCRCELKLQKWYGDLRGKPFAIEAENSILDISGFSKQYNCAFIWQKDGVKKLNLYLIINYFKGGKLRFKKIKPEAFEANRFYTVINKKSGEIVPMEVNFNFDDPNLIILPLAFGKRQGREFIWNDLLSLETGSLKLANGRVIEKTLYNRRTRQDEPALFVALTFERREVLDSSNIKPMNLIGVDRGENIPAVIALTDPEGCPLSRFKDSLGNPTHILRIGESYKEKQRTIQAKKEVEQRRAGGYSRKYASKAKNLADDMVRNTARDLLYYAVTQDAMLIFENLSRGFGRQGKRTFMAERQYTRMEDWLTAKLAYEGLPSKTYLSKTLAQYTSKTCSNCGFTITSADYDRVLEKLKKTATGWMTTINGKELKVEGQITYYNRYKRQNVVKDLSVELDRLSEESVNNDISSWTKGRSGEALSLLKKRFSHRPVQEKFVCLNCGFETHADEQAALNIARSWLFLRSQEYKKYQTNKTTGNTDKRAFVETWQSFYRKKLKEVWKPAV

SEQ ID NO: 19979 - protein, 979 aa, synthetic construct
MQEIKRINKIRRRLVKDSNTKKAGKTGPMKTLLVRVMTPDLRERLENLRKKPENIPQPISNTSRANLNKLLTDYTEMKKAILHVYWEEFQKDPVGLMSRVAQPASKKIDQNKLKPEMDEKGNLTTAGFACSQCGQPLFVYKLEQVSEKGKAYTNYFGRCNVAEHEKLILLAQLKPEKDSDEAVTYSLGKFGQRALDFYSIHVTKESTHPVKPLAQIAGNRYASGPVGKALSDACMGTIASFLSKYQDIIIEHQKVVKGNQKRLESLRELAGKENLEYPSVTLPPQPHTKEGVDAYNEVIARVRTWVNLNLWQKLKLSRDDAKPLLRLKGFPSFPLVERQANEVDWWDMVCNVKKLINEKKEDGKVFWQNLAGYKRQEALRPYLSSEEDRKKGKKFARTQLGDLLLHLEKKHGEDWGKVYDEAWERIDKKVEGLSKHIKLEEERRSEDAQSKAALTDWLRAKASFVIEGLKEADKDEFCRCELKLQKWYGDLRGKPFAIEAENSILDISGFSKQYNCAFIWQKDGVKKLNLYLIINYFKGGKLRFKKIKPEAFEANRFYTVINKKSGEIVPMEVNFNFDDPNLIILPLAFGKRQGREFIWNDLLSLETGSLKLANGRVIEKTLYNRRTRQDEPALFVALTFERREVLDSSNIKPMNLIGVDRGENIPAVIALTDPEGCPLSRFKDSLGNPTHILRIGESYKEKQRTIQAKKEVEQRRAGGYSRKYASKAKNLADDMVRNTARDLLYYAVTQDAMLIFENLSRGFGRQGKRTFMAERQYTRMEDWLTAKLAYEGLPSKTYLSKTLAQYTSKTCSNCGFTITSADYDRVLEKLKKTATGWMTTINGKELKVEGQITYYNRYKRQNVVKDLSVELDRLSEESVNNDISSWTKGRSGEALSLLKKRFSHRPVQEKFVCLNCGFETHADEQAALNIARSWLFLRSQEYKKYQTNKTTGNTDKRAFVETWQSFYRKKLKEVWKPAV

SEQ ID NO: 19980 - protein, 979 aa, synthetic construct
MQEIKRINKIRRRLVKDSNTKKAGKTGPMKTLLVRVMTPDLRERLENLRKKPENIPQPISNTSRANLNKLLTDYTEMKKAILHVYWEEFQKDPVGLMSRVAQPASKKIDQNKLKPEMDEKGNLTTAGFACSQCGQPLFVYKLEQVSEKGKAYTNYFGRCNVAEHEKLILLAQLKPEKDSDEAVTYSLGKFGQRALDFYSIHVTKESTHPVKPLAQIAGNRYASGPVGKALSDACMGTIASFLSKYQDIIIEHQKVVKGNQKRLESLRELAGKENLEYPSVTLPPQPHTKEGVDAYNEVIARVRTWVNLNLWQKLKLSRDDAKPLLRLKGFPSFPLVERQANEVDWWDMVCNVKKLINEKKEDGKVFWQNLAGYKRQEALRPYLSSEEDRKKGKKFARYQLGDLLLHLEKKHGEDWGKVYDEAWERIDKKVEGLSKHIKLEEERRSEDAQSKAALTDWLRAKASFVIEGLKEADKDEFCRCELKLQKWYGDLRGKPFAIEAENSILDISGFSKQYNCAFIWQKDGVKKLNLYLIINYFKGGKLRFKKIKPEAFEANRFYTVINKKSGEIVPMEVNFNFDDPNLIILPLAFGKRQGREFIWNDLLSLETGSLKLANGRVIEKTLYNRRTRQDEPALFVALTFERREVLDSSNIKPMNLIGVDRGENIPAVIALTDPEGCPLSRFKDSLGNPTHILRIGESYKEKQRTIQAKKEVEQRRAGGYSRKYASKAKNLADDMVRNTARDLLYYAVTQDAMLIFENLSRGFGRQGKRTFMAERQYTRMEDWLTAKLAYEGLPSKTYLSKTLAQYTSKTCSNCGFTITSADYDRMLEKLKKTATGWMTTINGKELKVEGQITYYNRYKRQNVVKDLSVELDRLSEESVNNDISSWTKGRSGEALSLLKKRFSHRPVQEKFVCLNCGFETHADEQAALNIARSWLFLRSQEYKKYQTNKTTGNTDKRAFVETWQSFYRKKLKEVWKPAV

SEQ ID NO: 19981 - protein, 979 aa, synthetic construct
MQEIKRINKIRRRLVKDSNTKKAGKTGPMKTLLVRVMTPDLRERLENLRKKPENIPQPISNTSRANLNKLLTDYTEMKKAILHVYWEEFQKDPVGLMSRVAQPASKKIDQNKLKPEMDEKGNLTTAGFACSQCGQPLFVYKLEQVSEKGKAYTNYFGRCNVAEHEKLILLAQLKPEKDSDEAVTYSLGKFGQRALDFYSIHVTKESTHPVKPLAQIAGNRYASGPVGKALSDACMGTIASFLSKYQDIIIEHQKVVKGNQKRLESLRELAGKENLEYPSVTLPPQPHTKEGVDAYNEVIARVRTWVNLNLWQKLKLSRDDAKPLLRLKGFPSFPLVERQANEVDWWDMVCNVKKLINEKKEDGKVFWQNLAGYKRQEALRPYLSSEEDRKKGKKFARYQLGDLLLHLEKKHGEDWGKVYDEAWERIDKKVEGLSKHIKLEEERRSEDAQSKAALTDWLRAKASFVIEGLKEADKDEFCRCELKLQKWYGDLRGKPFAIEAENSILDISGFSKQYNCAFIWQKDGVKKLNLYLIINYFKGGKLRFKKIKPEAFEANRFYTVINKKSGEIVPMEVNFNFDDPNLIILPLAFGKRQGREFIWNDLLSLETGSLKLANGRVIEKTLYNRRTRQDEPALFVALTFERREVLDSSNIKPMNLIGVDRGENIPAVIALTDPEGCPLSRFKDSLGNPTHILRIGESYKEKQRTIQAKKEVEQRRAGGYSRKYASKAKNLADDMVRNTARDLLYYAVTQDAMLIFENLSRGFGRQGKRTFMAERQYTRMEDWLTAKLAYEGLPSKTYLSKTLAQYTSKTCSNCGFTITSADYDRVLEKLKKTATGWMTTINGKELKVEGQITYYNRYKRQNVVKDLSVELDRLSEESVNNDISSWDKGRSGEALSLLKKRFSHRPVQEKFVCLNCGFETHADEQAALNIARSWLFLRSQEYKKYQTNKTTGNTDKRAFVETWQSFYRKKLKEVWKPAV

SEQ ID NO: 19982 - protein, 979 aa, synthetic construct
MQEIKRINKIRRRLVKDSNTKKAGKTGPMKTLLVRVMTPDLRERLENLRKKPENIPQPISNTSRANLNKLLTDYTEMKKAILHVYWEEFQKDPVGLMSRVAQPASKKIDQNKLKPEMDEKGNLTTAGFACSQCGQPLFVYKLEQVSEKGKAYTNYFGRCNVAEHEKLILLAQLKPEKDSDEAVTYSLGKFGQRALDFYSIHVTKESTHPVKPLAQIAGNRYASGPVGKALSDACMGTIASFLSKYQDIIIEHQKVVKGNQKRLESLRELAGKENLEYPSVTLPPQPHTKEGVDAYNEVIARVRTWVNLNLWQKLKLSRDDAKPLLRLKGFPSFPLVERQANEVDWWDMVCNVKKLINEKKEDGKVFWQNLAGYKRQEALRPYLSSEEDRKKGKKFARYQLGDLLLHLEKKHGEDWGKVYDEAWERIDKKVEGLSKHIKLEEERRSEDAQSKAALTDWLRAKASFVIEGLKEADKDEFCRCELKLQKWYGDLRGKPFAIEAENSILDISGFSKQYNCAFIWQKDGVKKLNLYLIINYFKGGKLRFKKIKPEAFEANRFYTVINKKSGEIVPMEVNFNFDDPNLIILPLAFGKRQGREFIWNDLLSLETGSLKLANGRVIEKTLYNRRTRQDEPALFVALTFERREVLDSSNIKPMNLIGVDRGENIPAVIALTDPEGCPLSRFKDSLGNPTHILRIGESYKEKQRTIQAKKEVEQRRAGGYSRKYASKAKNLADDMVRNTARDLLYYAVTQDAMLIFENLSRGFGRQGKRTFMAERQYTRMEDWLTAKLAYEGLPSKTYLSKTLAQYTSKTCSNCGFTITSADYDRVLEKLKKTATGWMTTINGKELKVEGQITYYNRYKRQNVVKDLSVELDRLSEESVNNDISSWTKGRQGEALSLLKKRFSHRPVQEKFVCLNCGFETHADEQAALNIARSWLFLRSQEYKKYQTNKTTGNTDKRAFVETWQSFYRKKLKEVWKPAV

SEQ ID NO: 19983 - protein, 979 aa, synthetic construct
MQEIKRINGIRRRLVKDSNTKKAGKTGPMKTLLVPVMTPDLRERLENLRKKPENIPQPISNTSRANLNKLLTDYTEMKKAILHVYWEEFQKDPVGLMSRVAQPASKKIDQNKLKPEMDEKGNLTTAGFACSQCGQPLFVYKLEQVSEKGKAYTNYFGRCNVAEHEKLILLAQLKPEKDSDEAVTYSLGKFGQRALDFYSIHVTKESTHPVKPLAQIAGNRYASGPVGKALSDACMGTIASFLSKYQDIIIEHQKVVKGNQKRLESLRELAGKENLEYPSVTLPPQPHTKEGVDAYNEVIARVRMWVNLNLWQKLKLSRDDAKPLLRLKGFPSFPLVERQANEVDWWDMVCNVKKLINEKKEDGKVFWQNLAGYKRQEALRPYLSSEEDRKKGKKFARYQLGDLLLHLEKKHGEDWGKVYDEAWERIDKKVEGLSKHIKLEEERRSEDAQSKAALTDWLRAKASFVIEGLKEADKDEFCRCELKLQKWYGDLRGKPFAIEAENSILDISGFSKQYNCAFIWQKDGVKKLNLYLIINYFKGGKLRFKKIKPEAFEANRFYTVINKKSGEIVPMEVNFNFDDPNLIILPLAFGKRQGREFIWNDLLSLETGSLKLANGRVIEKTLYNRRTRQDEPALFVALTFERREVLDSSNIKPMNLIGVDRGENIPAVIALTDPEGCPLSRFKDSLGNPTHILRIGESYKEKQRTIQAKKEVEQRRAGGYSRKYASKAKNLADDMVRNTARDLLYYAVTQDAMLIFENLSRGFGRQGKRTFMAERQYTRMEDWLTAKLAYEGLPSKTYLSKTLAQYTSKTCSNCGFTITSADYDRVLEKLKKTATGWMTTINGKELKVEGQITYYNRYKRQNVVKDLSVELDRLSEESVNNDISSWTKGRSGEALSLLKKRFSHRPVQEKFVCLNCGFETHADEQAALNIARSWLFLRSQEYKKYQTNKTTGNTDKRAFVETWQSFYRKKLKEVWKPAV

SEQ ID NO: 19984 - protein, 983 aa, synthetic construct
MQEIGKRINKIRRRLVKDSNTKKAGKTRKTGPMKTLLVRVMTPDLRERLENLRKKPENIPQPISNTSRANLNKLLTDYTEMKKAILHVYWEEFQKDPVGLMSRVAQPASKKIDQNKLKPEMDEKGNLTTAGFACSQCGQPLFVYKLEQVSEKGKAYTNYFGRCNVAEHEKLILLAQLKPEKDSDEAVTYSLGKFGQRALDFYSIHVTKESTHPVKPLAQIAGNRYASGPVGKALSDACMGTIASFLSKYQDIIIEHQKVVKGNQKRLESLRELAGKENLEYPSVTLPPQPHTKEGVDAYNEVIARVRMWVNLNLWQKLKLSRDDAKPLLRLKGFPSFPLVERQANEVDWWDMVCNVKKLINEKKEDGKVFWQNLAGYKRQEALRPYLSSEEDRKKGKKFARYQLGDLLLHLEKKHGEDWGKVYDEAWERIDKKVEGLSKHIKLEEERRSEDAQSKAALTDWLRAKASFVIEGLKEADKDEFCRCELKLQKWYGDLRGKPFAIEAENSILDISGFSKQYNCAFIWQKDGVKKLNLYLIINYFKGGKLRFKKIKPEAFEANRFYTVINKKSGEIVPMEVNFNFDDPNLIILPLAFGKRQGREFIWNDLLSLETGSLKLANGRVIEKTLYNRRTRQDEPALFVALTFERREVLDSSNIKPMNLIGVDRGENIPAVIALTDPEGCPLSRFKDSLGNPTHILRIGESYKEKQRTIQAKKEVEQRRAGGYSRKYASKAKNLADDMVRNTARDLLYYAVTQDAMLIFENLSRGFGRQGKRTFMAERQYTRMEDWLTAKLAYEGLPSKTYLSKTLAQYTSKTCSNCGFTITSADYDRVLEKLKKTATGWMTTINGKELKVEGQITYYNRYKRQNVVKDLSVELDRLSEESVNNDISSWTKGRSGEALSLLKKRFSHRPVQEKFVCLNCGFETHADEQAALNIARSWLFLRSQEYKKYQTNKTTGNTDKRAFVETWQSFYRKKLKEVWKPAV

SEQ ID NO: 19985 - protein, 979 aa, synthetic construct
MQEGKRINGIRRRLVKDSNTKKAGKTGPMKTLLVRVMTPDLRERLENLRKKPENIPQPISNTSRANLNKLLTDYTEMKKAILHVYWEEFQKDPVGLMSRVAQPASKKIDQNKLKPEMDEKGNLTTAGFACSQCGQPLFVYKLEQVSEKGKAYTNYFGRCNVAEHEKLILLAQLKPEKDSDEAVTYSLGKFGQRALDFYSIHVTKESTHPVKPLAQIAGNRYASGPVGKALSDACMGTIASFLSKYQDIIIEHQKVVKGNQKRLESLRELAGKENLEYPSVTLPPQPHTKEGVDAYNEVIARVRMWVNLNLWQKLKLSRDDAKPLLRLKGFPSFPLVERQANEVDWWDMVCNVKKLINEKKEDGKVFWQNLAGYKRQEALRPYLSSEEDRKKGKKFARYQLGDLLLHLEKKHGEDWGKVYDEAWERIDKKVEGLSKHIKLEEERRSEDAQSKAALTDWLRAKASFVIEGLKEADKDEFCRCELKLQKWYGDLRGKPFAIEAENSILDISGFSKQYNCAFIWQKDGVKKLNLYLIINYFKGGKLRFKKIKPEAFEANRFYTVINKKSGEIVPMEVNFNFDDPNLIILPLAFGKRQGREFIWNDLLSLETGSLKLANGRVIEKTLYNRRTRQDEPALFVALTFERREVLDSSNIKPMNLIGVDRGENIPAVIALTDPEGCPLSRFKDSLGNPTHILRIGESYKEKQRTIQAKKEVEQRRAGGYSRKYASKAKNLADDMVRNTARDLLYYAVTQDAMLIFENLSRGFGRQGKRTFMAERQYTRMEDWLTAKLAYEGLPSKTYLSKTLAQYTSKTCSNCGFTITSADYDRVLEKLKKTATGWMTTINGKELKVEGQITYYNRYKRQNVVKDLSVELDRLSEESVNNDISSWTKGRSGEALSLLKKRFSHRPVQEKFVCLNCGFETHADEQAALNIARSWLFLRSQEYKKYQTNKTTGNTDKRAFVETWQSFYRKKLKEVWKPAV

SEQ ID NO: 19986 - protein, 979 aa, synthetic construct
MQEIKRINKIRRRLVKDSNTKKAGKTGPMKTLLVRVMTPDLRERLENLRKKPENIPQPISNTSRANLNKLLTDYTEMKKAILHVYWEEFQKDPVGLMSRVAQPASKKIDQNKLKPEMDEKGNLTTAGFACSQCGQPLFVYKLEQVSEKGKAYTNYFGRCNVAEHEKLILLAQLKPEKDSDEAVTYSLGKFGQRALDFYSIHVTKESTHPVKPLAQIAGNRYASGPVGKALSDACMGTIASFLSKYQDIIIEHQKVVKGNQKRLESLRELAGKENLEYPSVTLPPQPHTKEGVDAYNEVIARVRMWVNLNLWQKLKLSRDDAKPLLRLKGFPSFPLVERQANEVDWWDMVCNVKKLINEKKEDGKVFWQNLAGYKRQEALRPYLSSEEDRKKGKKFARTQLGDLLLHLEKKHGEDWGKVYDEAWERIDKKVEGLSKHIKLEEERRSEDAQSKAALTDWLRAKASFVIEGLKEADKDEFCRCELKLQKWYGDLRGKPFAIEAENSILDISGFSKQYNCAFIWQKDGVKKLNLYLIINYFKGGKLRFKKIKPEAFEANRFYTVINKKSGEIVPMEVNFNFDDPNLIILPLAFGKRQGREFIWNDLLSLETGSLKLANGRVIEKTLYNRRTRQDEPALFVALTFERREVLDSSNIKPMNLIGVDRGENIPAVIALTDPEGCPLSRFKDSLGNPTHILRIGESYKEKQRTIQAKKEVEQRRAGGYSRKYASKAKNLADDMVRNTARDLLYYAVTQDAMLIFENLSRGFGRQGKRTFMAERQYTRMEDWLTAKLAYEGLPSKTYLSKTLAQYTSKTCSNCGFTITSADYDRMLEKLKKTATGWMTTINGKELKVEGQITYYNRYKRQNVVKDLSVELDRLSEESVNNDISSWTKGRSGEALSLLKKRFSHRPVQEKFVCLNCGFETHADEQAALNIARSWLFLRSQEYKKYQTNKTTGNTDKRAFVETWQSFYRKKLKEVWKPAV

SEQ ID NO: 19987 - protein, 979 aa, synthetic construct
MQEIKRINKIRRRLVKDSNTKKAGKTGPMKTLLVRVMTPDLRERLENLRKKPENIPQPISNTSRANLNKLLTDYTEMKKAILHVYWEEFQKDPVGLMSRVAQPASKKIDQNKLKPEMDEKGNLTTAGFACSQCGQPLFVYKLEQVSEKGKAYTNYFGRCNVAEHEKLILLAQLKPEKDSDEAVTYSLGKFGQRALDFYSIHVTKESTHPVKPLAQIAGNRYASGPVGKALSDACMGTIASFLSKYQDIIIEHQKVVKGNQKRLESLRELAGKENLEYPSVTLPPQPHTKEGVDAYNEVIARVRMWVNLNLWQKLKLSRDDAKPLLRLKGFPSFPLVERQANEVDWWDMVCNVKKLINEKKEDGKVFWQNLAGYKRQEALRPYLSSEEDRKKGKKFARTQLGDLLLHLEKKHGEDWGKVYDEAWERIDKKVEGLSKHIKLEEERRSEDAQSKAALTDWLRAKASFVIEGLKEADKDEFCRCELKLQKWYGDLRGKPFAIEAENSILDISGFSKQYNCAFIWQKDGVKKLNLYLIINYFKGGKLRFKKIKPEAFEANRFYTVINKKSGEIVPMEVNFNFDDPNLIILPLAFGKRQGREFIWNDLLSLETGSLKLANGRVIEKTLYNRRTRQDEPALFVALTFERREVLDSSNIKPMNLIGVDRGENIPAVIALTDPEGCPLSRFKDSLGNPTHILRIGESYKEKQRTIQAKKEVEQRRAGGYSRKYASKAKNLADDMVRNTARDLLYYAVTQDAMLIFENLSRGFGRQGKRTFMAERQYTRMEDWLTAKLAYEGLPSKTYLSKTLAQYTSKTCSNCGFTITSADYDRVLEKLKKTATGWMTTINGKELKVEGQITYYNRYKRQNVVKDLSVELDRLSEESVNNDISSWDKGRSGEALSLLKKRFSHRPVQEKFVCLNCGFETHADEQAALNIARSWLFLRSQEYKKYQTNKTTGNTDKRAFVETWQSFYRKKLKEVWKPAV

SEQ ID NO: 19988 - protein, 979 aa, synthetic construct
MQEIKRINKIRRRLVKDSNTKKAGKTGPMKTLLVRVMTPDLRERLENLRKKPENIPQPISNTSRANLNKLLTDYTEMKKAILHVYWEEFQKDPVGLMSRVAQPASKKIDQNKLKPEMDEKGNLTTAGFACSQCGQPLFVYKLEQVSEKGKAYTNYFGRCNVAEHEKLILLAQLKPEKDSDEAVTYSLGKFGQRALDFYSIHVTKESTHPVKPLAQIAGNRYASGPVGKALSDACMGTIASFLSKYQDIIIEHQKVVKGNQKRLESLRELAGKENLEYPSVTLPPQPHTKEGVDAYNEVIARVRMWVNLNLWQKLKLSRDDAKPLLRLKGFPSFPLVERQANEVDWWDMVCNVKKLINEKKEDGKVFWQNLAGYKRQEALRPYLSSEEDRKKGKKFARTQLGDLLLHLEKKHGEDWGKVYDEAWERIDKKVEGLSKHIKLEEERRSEDAQSKAALTDWLRAKASFVIEGLKEADKDEFCRCELKLQKWYGDLRGKPFAIEAENSILDISGFSKQYNCAFIWQKDGVKKLNLYLIINYFKGGKLRFKKIKPEAFEANRFYTVINKKSGEIVPMEVNFNFDDPNLIILPLAFGKRQGREFIWNDLLSLETGSLKLANGRVIEKTLYNRRTRQDEPALFVALTFERREVLDSSNIKPMNLIGVDRGENIPAVIALTDPEGCPLSRFKDSLGNPTHILRIGESYKEKQRTIQAKKEVEQRRAGGYSRKYASKAKNLADDMVRNTARDLLYYAVTQDAMLIFENLSRGFGRQGKRTFMAERQYTRMEDWLTAKLAYEGLPSKTYLSKTLAQYTSKTCSNCGFTITSADYDRVLEKLKKTATGWMTTINGKELKVEGQITYYNRYKRQNVVKDLSVELDRLSEESVNNDISSWTKGRQGEALSLLKKRFSHRPVQEKFVCLNCGFETHADEQAALNIARSWLFLRSQEYKKYQTNKTTGNTDKRAFVETWQSFYRKKLKEVWKPAV

SEQ ID NO: 19989 - protein, 980 aa, synthetic construct
MQEIKRINKIRRRLVKDSNTKKAGKTRGPMKTLLVPVMTPDLRERLENLRKKPENIPQPISNTSRANLNKLLTDYTEMKKAILHVYWEEFQKDPVGLMSRVAQPASKKIDQNKLKPEMDEKGNLTTAGFACSQCGQPLFVYKLEQVSEKGKAYTNYFGRCNVAEHEKLILLAQLKPEKDSDEAVTYSLGKFGQRALDFYSIHVTKESTHPVKPLAQIAGNRYASGPVGKALSDACMGTIASFLSKYQDIIIEHQKVVKGNQKRLESLRELAGKENLEYPSVTLPPQPHTKEGVDAYNEVIARVRMWVNLNLWQKLKLSRDDAKPLLRLKGFPSFPLVERQANEVDWWDMVCNVKKLINEKKEDGKVFWQNLAGYKRQEALRPYLSSEEDRKKGKKFARYQLGDLLLHLEKKHGEDWGKVYDEAWERIDKKVEGLSKHIKLEEERRSEDAQSKAALTDWLRAKASFVIEGLKEADKDEFCRCELKLQKWYGDLRGKPFAIEAENSILDISGFSKQYNCAFIWQKDGVKKLNLYLIINYFKGGKLRFKKIKPEAFEANRFYTVINKKSGEIVPMEVNFNFDDPNLIILPLAFGKRQGREFIWNDLLSLETGSLKLANGRVIEKTLYNRRTRQDEPALFVALTFERREVLDSSNIKPMNLIGVDRGENIPAVIALTDPEGCPLSRFKDSLGNPTHILRIGESYKEKQRTIQAKKEVEQRRAGGYSRKYASKAKNLADDMVRNTARDLLYYAVTQDAMLIFENLSRGFGRQGKRTFMAERQYTRMEDWLTAKLAYEGLPSKTYLSKTLAQYTSKTCSNCGFTITSADYDRVLEKLKKTATGWMTTINGKELKVEGQITYYNRYKRQNVVKDLSVELDRLSEESVNNDISSWTKGRSGEALSLLKKRFSHRPVQEKFVCLNCGFETHADEQAALNIARSWLFLRSQEYKKYQTNKTTGNTDKRAFVETWQSFYRKKLKEVWKPAV

SEQ ID NO: 19990 - protein, 980 aa, synthetic construct
MQEIKRINGIRRRLVKDSNTKKAGKTRGPMKTLLVRVMTPDLRERLENLRKKPENIPQPISNTSRANLNKLLTDYTEMKKAILHVYWEEFQKDPVGLMSRVAQPASKKIDQNKLKPEMDEKGNLTTAGFACSQCGQPLFVYKLEQVSEKGKAYTNYFGRCNVAEHEKLILLAQLKPEKDSDEAVTYSLGKFGQRALDFYSIHVTKESTHPVKPLAQIAGNRYASGPVGKALSDACMGTIASFLSKYQDIIIEHQKVVKGNQKRLESLRELAGKENLEYPSVTLPPQPHTKEGVDAYNEVIARVRMWVNLNLWQKLKLSRDDAKPLLRLKGFPSFPLVERQANEVDWWDMVCNVKKLINEKKEDGKVFWQNLAGYKRQEALRPYLSSEEDRKKGKKFARYQLGDLLLHLEKKHGEDWGKVYDEAWERIDKKVEGLSKHIKLEEERRSEDAQSKAALTDWLRAKASFVIEGLKEADKDEFCRCELKLQKWYGDLRGKPFAIEAENSILDISGFSKQYNCAFIWQKDGVKKLNLYLIINYFKGGKLRFKKIKPEAFEANRFYTVINKKSGEIVPMEVNFNFDDPNLIILPLAFGKRQGREFIWNDLLSLETGSLKLANGRVIEKTLYNRRTRQDEPALFVALTFERREVLDSSNIKPMNLIGVDRGENIPAVIALTDPEGCPLSRFKDSLGNPTHILRIGESYKEKQRTIQAKKEVEQRRAGGYSRKYASKAKNLADDMVRNTARDLLYYAVTQDAMLIFENLSRGFGRQGKRTFMAERQYTRMEDWLTAKLAYEGLPSKTYLSKTLAQYTSKTCSNCGFTITSADYDRVLEKLKKTATGWMTTINGKELKVEGQITYYNRYKRQNVVKDLSVELDRLSEESVNNDISSWTKGRSGEALSLLKKRFSHRPVQEKFVCLNCGFETHADEQAALNIARSWLFLRSQEYKKYQTNKTTGNTDKRAFVETWQSFYRKKLKEVWKPAV

SEQ ID NO: 19991 - protein, 980 aa, synthetic construct
MQEIGKRINGIRRRLVKDSNTKKAGKTGPMKTLLVRVMTPDLRERLENLRKKPENIPQPISNTSRANLNKLLTDYTEMKKAILHVYWEEFQKDPVGLMSRVAQPASKKIDQNKLKPEMDEKGNLTTAGFACSQCGQPLFVYKLEQVSEKGKAYTNYFGRCNVAEHEKLILLAQLKPEKDSDEAVTYSLGKFGQRALDFYSIHVTKESTHPVKPLAQIAGNRYASGPVGKALSDACMGTIASFLSKYQDIIIEHQKVVKGNQKRLESLRELAGKENLEYPSVTLPPQPHTKEGVDAYNEVIARVRMWVNLNLWQKLKLSRDDAKPLLRLKGFPSFPLVERQANEVDWWDMVCNVKKLINEKKEDGKVFWQNLAGYKRQEALRPYLSSEEDRKKGKKFARYQLGDLLLHLEKKHGEDWGKVYDEAWERIDKKVEGLSKHIKLEEERRSEDAQSKAALTDWLRAKASFVIEGLKEADKDEFCRCELKLQKWYGDLRGKPFAIEAENSILDISGFSKQYNCAFIWQKDGVKKLNLYLIINYFKGGKLRFKKIKPEAFEANRFYTVINKKSGEIVPMEVNFNFDDPNLIILPLAFGKRQGREFIWNDLLSLETGSLKLANGRVIEKTLYNRRTRQDEPALFVALTFERREVLDSSNIKPMNLIGVDRGENIPAVIALTDPEGCPLSRFKDSLGNPTHILRIGESYKEKQRTIQAKKEVEQRRAGGYSRKYASKAKNLADDMVRNTARDLLYYAVTQDAMLIFENLSRGFGRQGKRTFMAERQYTRMEDWLTAKLAYEGLPSKTYLSKTLAQYTSKTCSNCGFTITSADYDRVLEKLKKTATGWMTTINGKELKVEGQITYYNRYKRQNVVKDLSVELDRLSEESVNNDISSWTKGRSGEALSLLKKRFSHRPVQEKFVCLNCGFETHADEQAALNIARSWLFLRSQEYKKYQTNKTTGNTDKRAFVETWQSFYRKKLKEVWKPAV

SEQ ID NO: 19992 - protein, 980 aa, synthetic construct
MQEGGKRINKIRRRLVKDSNTKKAGKTGPMKTLLVRVMTPDLRERLENLRKKPENIPQPISNTSRANLNKLLTDYTEMKKAILHVYWEEFQKDPVGLMSRVAQPASKKIDQNKLKPEMDEKGNLTTAGFACSQCGQPLFVYKLEQVSEKGKAYTNYFGRCNVAEHEKLILLAQLKPEKDSDEAVTYSLGKFGQRALDFYSIHVTKESTHPVKPLAQIAGNRYASGPVGKALSDACMGTIASFLSKYQDIIIEHQKVVKGNQKRLESLRELAGKENLEYPSVTLPPQPHTKEGVDAYNEVIARVRMWVNLNLWQKLKLSRDDAKPLLRLKGFPSFPLVERQANEVDWWDMVCNVKKLINEKKEDGKVFWQNLAGYKRQEALRPYLSSEEDRKKGKKFARYQLGDLLLHLEKKHGEDWGKVYDEAWERIDKKVEGLSKHIKLEEERRSEDAQSKAALTDWLRAKASFVIEGLKEADKDEFCRCELKLQKWYGDLRGKPFAIEAENSILDISGFSKQYNCAFIWQKDGVKKLNLYLIINYFKGGKLRFKKIKPEAFEANRFYTVINKKSGEIVPMEVNFNFDDPNLIILPLAFGKRQGREFIWNDLLSLETGSLKLANGRVIEKTLYNRRTRQDEPALFVALTFERREVLDSSNIKPMNLIGVDRGENIPAVIALTDPEGCPLSRFKDSLGNPTHILRIGESYKEKQRTIQAKKEVEQRRAGGYSRKYASKAKNLADDMVRNTARDLLYYAVTQDAMLIFENLSRGFGRQGKRTFMAERQYTRMEDWLTAKLAYEGLPSKTYLSKTLAQYTSKTCSNCGFTITSADYDRVLEKLKKTATGWMTTINGKELKVEGQITYYNRYKRQNVVKDLSVELDRLSEESVNNDISSWTKGRSGEALSLLKKRFSHRPVQEKFVCLNCGFETHADEQAALNIARSWLFLRSQEYKKYQTNKTTGNTDKRAFVETWQSFYRKKLKEVWKPAV

SEQ ID NO: 19993 - protein, 979 aa, synthetic construct
MQEIKRINKIRRRLVKDSNTKKAGKTGPMKTLLVRVMTPDLRERLENLRKKPENIPQPISNTSRANLNKLLTDYTEMKKAILHVYWEEFQKDPVGLMSRVAQPASKKIDQNKLKPEMDEKGNLTTAGFACSQCGQPLFVYKLEQVSEKGKAYTNYFGRCNVAEHEKLILLAQLKPEKDSDEAVTYSLGKFGQRALDFYSIHVTKESTHPVKPLAQIAGNRYASGPVGKALSDACMGTIASFLSKYQDIIIEHQKVVKGNQKRLESLRELAGKENLEYPSVTLPPQPHTKEGVDAYNEVIARVRMWVNLNLWQKLKLSRDDAKPLLRLKGFPSFPLVERQANEVDWWDMVCNVKKLINEKKEDGKVFWQNLAGYKRQEALRPYLSSEEDRKKGKKFARYQLGDLLLHLEKKHGEDWGKVYDEAWERIDKKVEGLSKHIKLEEERRSEDAQSKAALTDWLRAKASFVIEGLKEADKDEFCRCELKLQKWYGDLRGKPFAIEAENSILDISGFSKQYNCAFIWQKDGVKKLNLYLIINYFKGGKLRFKKIKPEAFEANRFYTVINKKSGEIVPMEVNFNFDDPNLIILPLAFGKRQGREFIWNDLLSLETGSLKLANGRVIEKTLYNRRTRQDEPALFVALTFERREVLDSSNIKPMNLIGVDRGENIPAVIALTDPEGCPLSRFKDSLGNPTHILRIGESYKEKQRTIQAKKEVEQRRAGGYSRKYASKAKNLADDMVRNTARDLLYYAVTQDAMLIFENLSRGFGRQGKRTFMAERQYTRMEDWLTAKLAYEGLPSKTYLSKTLAQYTSKTCSNCGFTITSADYDRMLEKLKKTATGWMTTINGKELKVEGQITYYNRYKRQNVVKDLSVELDRLSEESVNNDISSWDKGRSGEALSLLKKRFSHRPVQEKFVCLNCGFETHADEQAALNIARSWLFLRSQEYKKYQTNKTTGNTDKRAFVETWQSFYRKKLKEVWKPAV

SEQ ID NO: 19994 - protein, 979 aa, synthetic construct
MQEIKRINKIRRRLVKDSNTKKAGKTGPMKTLLVRVMTPDLRERLENLRKKPENIPQPISNTSRANLNKLLTDYTEMKKAILHVYWEEFQKDPVGLMSRVAQPASKKIDQNKLKPEMDEKGNLTTAGFACSQCGQPLFVYKLEQVSEKGKAYTNYFGRCNVAEHEKLILLAQLKPEKDSDEAVTYSLGKFGQRALDFYSIHVTKESTHPVKPLAQIAGNRYASGPVGKALSDACMGTIASFLSKYQDIIIEHQKVVKGNQKRLESLRELAGKENLEYPSVTLPPQPHTKEGVDAYNEVIARVRMWVNLNLWQKLKLSRDDAKPLLRLKGFPSFPLVERQANEVDWWDMVCNVKKLINEKKEDGKVFWQNLAGYKRQEALRPYLSSEEDRKKGKKFARYQLGDLLLHLEKKHGEDWGKVYDEAWERIDKKVEGLSKHIKLEEERRSEDAQSKAALTDWLRAKASFVIEGLKEADKDEFCRCELKLQKWYGDLRGKPFAIEAENSILDISGFSKQYNCAFIWQKDGVKKLNLYLIINYFKGGKLRFKKIKPEAFEANRFYTVINKKSGEIVPMEVNFNFDDPNLIILPLAFGKRQGREFIWNDLLSLETGSLKLANGRVIEKTLYNRRTRQDEPALFVALTFERREVLDSSNIKPMNLIGVDRGENIPAVIALTDPEGCPLSRFKDSLGNPTHILRIGESYKEKQRTIQAKKEVEQRRAGGYSRKYASKAKNLADDMVRNTARDLLYYAVTQDAMLIFENLSRGFGRQGKRTFMAERQYTRMEDWLTAKLAYEGLPSKTYLSKTLAQYTSKTCSNCGFTITSADYDRMLEKLKKTATGWMTTINGKELKVEGQITYYNRYKRQNVVKDLSVELDRLSEESVNNDISSWTKGRQGEALSLLKKRFSHRPVQEKFVCLNCGFETHADEQAALNIARSWLFLRSQEYKKYQTNKTTGNTDKRAFVETWQSFYRKKLKEVWKPAV

SEQ ID NO: 19995 - protein, 980 aa, synthetic construct
MQEIGRINKIRRRLVKDSNTKKAGKTRGPMKTLLVRVMTPDLRERLENLRKKPENIPQPISNTSRANLNKLLTDYTEMKKAILHVYWEEFQKDPVGLMSRVAQPASKKIDQNKLKPEMDEKGNLTTAGFACSQCGQPLFVYKLEQVSEKGKAYTNYFGRCNVAEHEKLILLAQLKPEKDSDEAVTYSLGKFGQRALDFYSIHVTKESTHPVKPLAQIAGNRYASGPVGKALSDACMGTIASFLSKYQDIIIEHQKVVKGNQKRLESLRELAGKENLEYPSVTLPPQPHTKEGVDAYNEVIARVRMWVNLNLWQKLKLSRDDAKPLLRLKGFPSFPLVERQANEVDWWDMVCNVKKLINEKKEDGKVFWQNLAGYKRQEALRPYLSSEEDRKKGKKFARYQLGDLLLHLEKKHGEDWGKVYDEAWERIDKKVEGLSKHIKLEEERRSEDAQSKAALTDWLRAKASFVIEGLKEADKDEFCRCELKLQKWYGDLRGKPFAIEAENSILDISGFSKQYNCAFIWQKDGVKKLNLYLIINYFKGGKLRFKKIKPEAFEANRFYTVINKKSGEIVPMEVNFNFDDPNLIILPLAFGKRQGREFIWNDLLSLETGSLKLANGRVIEKTLYNRRTRQDEPALFVALTFERREVLDSSNIKPMNLIGVDRGENIPAVIALTDPEGCPLSRFKDSLGNPTHILRIGESYKEKQRTIQAKKEVEQRRAGGYSRKYASKAKNLADDMVRNTARDLLYYAVTQDAMLIFENLSRGFGRQGKRTFMAERQYTRMEDWLTAKLAYEGLPSKTYLSKTLAQYTSKTCSNCGFTITSADYDRVLEKLKKTATGWMTTINGKELKVEGQITYYNRYKRQNVVKDLSVELDRLSEESVNNDISSWTKGRSGEALSLLKKRFSHRPVQEKFVCLNCGFETHADEQAALNIARSWLFLRSQEYKKYQTNKTTGNTDKRAFVETWQSFYRKKLKEVWKPAV

SEQ ID NO: 19996 - protein, 979 aa, synthetic construct
MQEIGRINKIRRRLVKDSNTKKAGKTGPMKTLLVRVMTPDLRERLENLRKKPENIPQPISNTSRANLNKLLTDYTEMKKAILHVYWEEFQKDPVGLMSRVAQPASKKIDQNKLKPEMDEKGNLTTAGFACSQCGQPLFVYKLEQVSEKGKAYTNYFGRCNVAEHEKLIKLAQLKPEKDSDEAVTYSLGKFGQRALDFYSIHVTKESTHPVKPLAQIAGNRYASGPVGKALSDACMGTIASFLSKYQDIIIEHQKVVKGNQKRLESLRELAGKENLEYPSVTLPPQPHTKEGVDAYNEVIARVRMWVNLNLWQKLKLSRDDAKPLLRLKGFPSFPLVERQANEVDWWDMVCNVKKLINEKKEDGKVFWQNLAGYKRQEALRPYLSSEEDRKKGKKFARYQLGDLLLHLEKKHGEDWGKVYDEAWERIDKKVEGLSKHIKLEEERRSEDAQSKAALTDWLRAKASFVIEGLKEADKDEFCRCELKLQKWYGDLRGKPFAIEAENSILDISGFSKQYNCAFIWQKDGVKKLNLYLIINYFKGGKLRFKKIKPEAFEANRFYTVINKKSGEIVPMEVNFNFDDPNLIILPLAFGKRQGREFIWNDLLSLETGSLKLANGRVIEKTLYNRRTRQDEPALFVALTFERREVLDSSNIKPMNLIGVDRGENIPAVIALTDPEGCPLSRFKDSLGNPTHILRIGESYKEKQRTIQAKKEVEQRRAGGYSRKYASKAKNLADDMVRNTARDLLYYAVTQDAMLIFENLSRGFGRQGKRTFMAERQYTRMEDWLTAKLAYEGLPSKTYLSKTLAQYTSKTCSNCGFTITSADYDRVLEKLKKTATGWMTTINGKELKVEGQITYYNRYKRQNVVKDLSVELDRLSEESVNNDISSWTKGRSGEALSLLKKRFSHRPVQEKFVCLNCGFETHADEQAALNIARSWLFLRSQEYKKYQTNKTTGNTDKRAFVETWQSFYRKKLKEVWKPAV

SEQ ID NO: 19997 - protein, 979 aa, synthetic construct
MQEIGRINKIRRRLVKDSNTKKAGKTGPMKTLLVRVMTPDLRERLENLRKKPENIPQPISNTSRANLNKLLTDYTEMKKAILHVYWEEFQKDPVGLMSRVAQPASKKIDQNKLKPEMDEKGNLTTAGFACSQCGQPLFVYKLEQVSEKGKAYTNYFGRCNVAEHEKLILLDQLKPEKDSDEAVTYSLGKFGQRALDFYSIHVTKESTHPVKPLAQIAGNRYASGPVGKALSDACMGTIASFLSKYQDIIIEHQKVVKGNQKRLESLRELAGKENLEYPSVTLPPQPHTKEGVDAYNEVIARVRMWVNLNLWQKLKLSRDDAKPLLRLKGFPSFPLVERQANEVDWWDMVCNVKKLINEKKEDGKVFWQNLAGYKRQEALRPYLSSEEDRKKGKKFARYQLGDLLLHLEKKHGEDWGKVYDEAWERIDKKVEGLSKHIKLEEERRSEDAQSKAALTDWLRAKASFVIEGLKEADKDEFCRCELKLQKWYGDLRGKPFAIEAENSILDISGFSKQYNCAFIWQKDGVKKLNLYLIINYFKGGKLRFKKIKPEAFEANRFYTVINKKSGEIVPMEVNFNFDDPNLIILPLAFGKRQGREFIWNDLLSLETGSLKLANGRVIEKTLYNRRTRQDEPALFVALTFERREVLDSSNIKPMNLIGVDRGENIPAVIALTDPEGCPLSRFKDSLGNPTHILRIGESYKEKQRTIQAKKEVEQRRAGGYSRKYASKAKNLADDMVRNTARDLLYYAVTQDAMLIFENLSRGFGRQGKRTFMAERQYTRMEDWLTAKLAYEGLPSKTYLSKTLAQYTSKTCSNCGFTITSADYDRVLEKLKKTATGWMTTINGKELKVEGQITYYNRYKRQNVVKDLSVELDRLSEESVNNDISSWTKGRSGEALSLLKKRFSHRPVQEKFVCLNCGFETHADEQAALNIARSWLFLRSQEYKKYQTNKTTGNTDKRAFVETWQSFYRKKLKEVWKPAV

SEQ ID NO: 19998 - protein, 979 aa, synthetic construct
MQEIGRINKIRRRLVKDSNTKKAGKTGPMKTLLVRVMTPDLRERLENLRKKPENIPQPISNTSRANLNKLLTDYTEMKKAILHVYWEEFQKDPVGLMSRVAQPASKKIDQNKLKPEMDEKGNLTTAGFACSQCGQPLFVYKLEQVSEKGKAYTNYFGRCNVAEHEKLILLAQLKPEKDSDEAVTYSLGKFGQRALDFYSIHVTKESTHPVKPLAQIAGNRYASGPVGKALSDACMGTIASFLSKYQDIIIEHQKVVKGNQKRLESLRELAGKENLEYPSVTLPPQPHTKEGVDAYNEVIARVRTWVNLNLWQKLKLSRDDAKPLLRLKGFPSFPLVERQANEVDWWDMVCNVKKLINEKKEDGKVFWQNLAGYKRQEALRPYLSSEEDRKKGKKFARYQLGDLLLHLEKKHGEDWGKVYDEAWERIDKKVEGLSKHIKLEEERRSEDAQSKAALTDWLRAKASFVIEGLKEADKDEFCRCELKLQKWYGDLRGKPFAIEAENSILDISGFSKQYNCAFIWQKDGVKKLNLYLIINYFKGGKLRFKKIKPEAFEANRFYTVINKKSGEIVPMEVNFNFDDPNLIILPLAFGKRQGREFIWNDLLSLETGSLKLANGRVIEKTLYNRRTRQDEPALFVALTFERREVLDSSNIKPMNLIGVDRGENIPAVIALTDPEGCPLSRFKDSLGNPTHILRIGESYKEKQRTIQAKKEVEQRRAGGYSRKYASKAKNLADDMVRNTARDLLYYAVTQDAMLIFENLSRGFGRQGKRTFMAERQYTRMEDWLTAKLAYEGLPSKTYLSKTLAQYTSKTCSNCGFTITSADYDRVLEKLKKTATGWMTTINGKELKVEGQITYYNRYKRQNVVKDLSVELDRLSEESVNNDISSWTKGRSGEALSLLKKRFSHRPVQEKFVCLNCGFETHADEQAALNIARSWLFLRSQEYKKYQTNKTTGNTDKRAFVETWQSFYRKKLKEVWKPAV

SEQ ID NO: 19999 - protein, 979 aa, synthetic construct
MQEIGRINKIRRRLVKDSNTKKAGKTGPMKTLLVRVMTPDLRERLENLRKKPENIPQPISNTSRANLNKLLTDYTEMKKAILHVYWEEFQKDPVGLMSRVAQPASKKIDQNKLKPEMDEKGNLTTAGFACSQCGQPLFVYKLEQVSEKGKAYTNYFGRCNVAEHEKLILLAQLKPEKDSDEAVTYSLGKFGQRALDFYSIHVTKESTHPVKPLAQIAGNRYASGPVGKALSDACMGTIASFLSKYQDIIIEHQKVVKGNQKRLESLRELAGKENLEYPSVTLPPQPHTKEGVDAYNEVIARVRMWVNLNLWQKLKLSRDDAKPLLRLKGFPSFPLVERQANEVDWWDMVCNVKKLINEKKEDGKVFWQNLAGYKRQEALRPYLSSEEDRKKGKKFARTQLGDLLLHLEKKHGEDWGKVYDEAWERIDKKVEGLSKHIKLEEERRSEDAQSKAALTDWLRAKASFVIEGLKEADKDEFCRCELKLQKWYGDLRGKPFAIEAENSILDISGFSKQYNCAFIWQKDGVKKLNLYLIINYFKGGKLRFKKIKPEAFEANRFYTVINKKSGEIVPMEVNFNFDDPNLIILPLAFGKRQGREFIWNDLLSLETGSLKLANGRVIEKTLYNRRTRQDEPALFVALTFERREVLDSSNIKPMNLIGVDRGENIPAVIALTDPEGCPLSRFKDSLGNPTHILRIGESYKEKQRTIQAKKEVEQRRAGGYSRKYASKAKNLADDMVRNTARDLLYYAVTQDAMLIFENLSRGFGRQGKRTFMAERQYTRMEDWLTAKLAYEGLPSKTYLSKTLAQYTSKTCSNCGFTITSADYDRVLEKLKKTATGWMTTINGKELKVEGQITYYNRYKRQNVVKDLSVELDRLSEESVNNDISSWTKGRSGEALSLLKKRFSHRPVQEKFVCLNCGFETHADEQAALNIARSWLFLRSQEYKKYQTNKTTGNTDKRAFVETWQSFYRKKLKEVWKPAV

SEQ ID NO: 20000 - protein, 979 aa, synthetic construct
MQEIGRINKIRRRLVKDSNTKKAGKTGPMKTLLVRVMTPDLRERLENLRKKPENIPQPISNTSRANLNKLLTDYTEMKKAILHVYWEEFQKDPVGLMSRVAQPASKKIDQNKLKPEMDEKGNLTTAGFACSQCGQPLFVYKLEQVSEKGKAYTNYFGRCNVAEHEKLILLAQLKPEKDSDEAVTYSLGKFGQRALDFYSIHVTKESTHPVKPLAQIAGNRYASGPVGKALSDACMGTIASFLSKYQDIIIEHQKVVKGNQKRLESLRELAGKENLEYPSVTLPPQPHTKEGVDAYNEVIARVRMWVNLNLWQKLKLSRDDAKPLLRLKGFPSFPLVERQANEVDWWDMVCNVKKLINEKKEDGKVFWQNLAGYKRQEALRPYLSSEEDRKKGKKFARYQLGDLLLHLEKKHGEDWGKVYDEAWERIDKKVEGLSKHIKLEEERRSEDAQSKAALTDWLRAKASFVIEGLKEADKDEFCRCELKLQKWYGDLRGKPFAIEAENSILDISGFSKQYNCAFIWQKDGVKKLNLYLIINYFKGGKLRFKKIKPEAFEANRFYTVINKKSGEIVPMEVNFNFDDPNLIILPLAFGKRQGREFIWNDLLSLETGSLKLANGRVIEKTLYNRRTRQDEPALFVALTFERREVLDSSNIKPMNLIGVDRGENIPAVIALTDPEGCPLSRFKDSLGNPTHILRIGESYKEKQRTIQAKKEVEQRRAGGYSRKYASKAKNLADDMVRNTARDLLYYAVTQDAMLIFENLSRGFGRQGKRTFMAERQYTRMEDWLTAKLAYEGLPSKTYLSKTLAQYTSKTCSNCGFTITSADYDRVLEKLKKTATGWMTTINGKELKVEGQITYYNRYKRQNVVKDLSVELDRLSEESVNNDISSWTKGRQGEALSLLKKRFSHRPVQEKFVCLNCGFETHADEQAALNIARSWLFLRSQEYKKYQTNKTTGNTDKRAFVETWQSFYRKKLKEVWKPAV

SEQ ID NO: 20001 - protein, 983 aa, synthetic construct
MQEIKGRINKIRRRLVKDSNTKKAGKTRKTGPMKTLLVRVMTPDLRERLENLRKKPENIPQPISNTSRANLNKLLTDYTEMKKAILHVYWEEFQKDPVGLMSRVAQPASKKIDQNKLKPEMDEKGNLTTAGFACSQCGQPLFVYKLEQVSEKGKAYTNYFGRCNVAEHEKLILLAQLKPEKDSDEAVTYSLGKFGQRALDFYSIHVTKESTHPVKPLAQIAGNRYASGPVGKALSDACMGTIASFLSKYQDIIIEHQKVVKGNQKRLESLRELAGKENLEYPSVTLPPQPHTKEGVDAYNEVIARVRMWVNLNLWQKLKLSRDDAKPLLRLKGFPSFPLVERQANEVDWWDMVCNVKKLINEKKEDGKVFWQNLAGYKRQEALRPYLSSEEDRKKGKKFARYQLGDLLLHLEKKHGEDWGKVYDEAWERIDKKVEGLSKHIKLEEERRSEDAQSKAALTDWLRAKASFVIEGLKEADKDEFCRCELKLQKWYGDLRGKPFAIEAENSILDISGFSKQYNCAFIWQKDGVKKLNLYLIINYFKGGKLRFKKIKPEAFEANRFYTVINKKSGEIVPMEVNFNFDDPNLIILPLAFGKRQGREFIWNDLLSLETGSLKLANGRVIEKTLYNRRTRQDEPALFVALTFERREVLDSSNIKPMNLIGVDRGENIPAVIALTDPEGCPLSRFKDSLGNPTHILRIGESYKEKQRTIQAKKEVEQRRAGGYSRKYASKAKNLADDMVRNTARDLLYYAVTQDAMLIFENLSRGFGRQGKRTFMAERQYTRMEDWLTAKLAYEGLPSKTYLSKTLAQYTSKTCSNCGFTITSADYDRVLEKLKKTATGWMTTINGKELKVEGQITYYNRYKRQNVVKDLSVELDRLSEESVNNDISSWTKGRSGEALSLLKKRFSHRPVQEKFVCLNCGFETHADEQAALNIARSWLFLRSQEYKKYQTNKTTGNTDKRAFVETWQSFYRKKLKEVWKPAV

SEQ ID NO: 20002 - protein, 980 aa, synthetic construct
MQEIKGRINKIRRRLVKDSNTKKAGKTGPMKTLLVRVMTPDLRERLENLRKKPENIPQPISNTSRANLNKLLTDYTEMKKAILHVYWEEFQKDPVGLMSRVAQPASKKIDQNKLKPEMDEKGNLTTAGFACSQCGQPLFVYKLEQVSEKGKAYTNYFGRCNVAEHEKLIKLAQLKPEKDSDEAVTYSLGKFGQRALDFYSIHVTKESTHPVKPLAQIAGNRYASGPVGKALSDACMGTIASFLSKYQDIIIEHQKVVKGNQKRLESLRELAGKENLEYPSVTLPPQPHTKEGVDAYNEVIARVRMWVNLNLWQKLKLSRDDAKPLLRLKGFPSFPLVERQANEVDWWDMVCNVKKLINEKKEDGKVFWQNLAGYKRQEALRPYLSSEEDRKKGKKFARYQLGDLLLHLEKKHGEDWGKVYDEAWERIDKKVEGLSKHIKLEEERRSEDAQSKAALTDWLRAKASFVIEGLKEADKDEFCRCELKLQKWYGDLRGKPFAIEAENSILDISGFSKQYNCAFIWQKDGVKKLNLYLIINYFKGGKLRFKKIKPEAFEANRFYTVINKKSGEIVPMEVNFNFDDPNLIILPLAFGKRQGREFIWNDLLSLETGSLKLANGRVIEKTLYNRRTRQDEPALFVALTFERREVLDSSNIKPMNLIGVDRGENIPAVIALTDPEGCPLSRFKDSLGNPTHILRIGESYKEKQRTIQAKKEVEQRRAGGYSRKYASKAKNLADDMVRNTARDLLYYAVTQDAMLIFENLSRGFGRQGKRTFMAERQYTRMEDWLTAKLAYEGLPSKTYLSKTLAQYTSKTCSNCGFTITSADYDRVLEKLKKTATGWMTTINGKELKVEGQITYYNRYKRQNVVKDLSVELDRLSEESVNNDISSWTKGRSGEALSLLKKRFSHRPVQEKFVCLNCGFETHADEQAALNIARSWLFLRSQEYKKYQTNKTTGNTDKRAFVETWQSFYRKKLKEVWKPAV

SEQ ID NO: 20003 - protein, 980 aa, synthetic construct
MQEIKGRINKIRRRLVKDSNTKKAGKTGPMKTLLVRVMTPDLRERLENLRKKPENIPQPISNTSRANLNKLLTDYTEMKKAILHVYWEEFQKDPVGLMSRVAQPASKKIDQNKLKPEMDEKGNLTTAGFACSQCGQPLFVYKLEQVSEKGKAYTNYFGRCNVAEHEKLILLDQLKPEKDSDEAVTYSLGKFGQRALDFYSIHVTKESTHPVKPLAQIAGNRYASGPVGKALSDACMGTIASFLSKYQDIIIEHQKVVKGNQKRLESLRELAGKENLEYPSVTLPPQPHTKEGVDAYNEVIARVRMWVNLNLWQKLKLSRDDAKPLLRLKGFPSFPLVERQANEVDWWDMVCNVKKLINEKKEDGKVFWQNLAGYKRQEALRPYLSSEEDRKKGKKFARYQLGDLLLHLEKKHGEDWGKVYDEAWERIDKKVEGLSKHIKLEEERRSEDAQSKAALTDWLRAKASFVIEGLKEADKDEFCRCELKLQKWYGDLRGKPFAIEAENSILDISGFSKQYNCAFIWQKDGVKKLNLYLIINYFKGGKLRFKKIKPEAFEANRFYTVINKKSGEIVPMEVNFNFDDPNLIILPLAFGKRQGREFIWNDLLSLETGSLKLANGRVIEKTLYNRRTRQDEPALFVALTFERREVLDSSNIKPMNLIGVDRGENIPAVIALTDPEGCPLSRFKDSLGNPTHILRIGESYKEKQRTIQAKKEVEQRRAGGYSRKYASKAKNLADDMVRNTARDLLYYAVTQDAMLIFENLSRGFGRQGKRTFMAERQYTRMEDWLTAKLAYEGLPSKTYLSKTLAQYTSKTCSNCGFTITSADYDRVLEKLKKTATGWMTTINGKELKVEGQITYYNRYKRQNVVKDLSVELDRLSEESVNNDISSWTKGRSGEALSLLKKRFSHRPVQEKFVCLNCGFETHADEQAALNIARSWLFLRSQEYKKYQTNKTTGNTDKRAFVETWQSFYRKKLKEVWKPAV

SEQ ID NO: 20004 - protein, 980 aa, synthetic construct
MQEIKGRINKIRRRLVKDSNTKKAGKTGPMKTLLVRVMTPDLRERLENLRKKPENIPQPISNTSRANLNKLLTDYTEMKKAILHVYWEEFQKDPVGLMSRVAQPASKKIDQNKLKPEMDEKGNLTTAGFACSQCGQPLFVYKLEQVSEKGKAYTNYFGRCNVAEHEKLILLAQLKPEKDSDEAVTYSLGKFGQRALDFYSIHVTKESTHPVKPLAQIAGNRYASGPVGKALSDACMGTIASFLSKYQDIIIEHQKVVKGNQKRLESLRELAGKENLEYPSVTLPPQPHTKEGVDAYNEVIARVRTWVNLNLWQKLKLSRDDAKPLLRLKGFPSFPLVERQANEVDWWDMVCNVKKLINEKKEDGKVFWQNLAGYKRQEALRPYLSSEEDRKKGKKFARYQLGDLLLHLEKKHGEDWGKVYDEAWERIDKKVEGLSKHIKLEEERRSEDAQSKAALTDWLRAKASFVIEGLKEADKDEFCRCELKLQKWYGDLRGKPFAIEAENSILDISGFSKQYNCAFIWQKDGVKKLNLYLIINYFKGGKLRFKKIKPEAFEANRFYTVINKKSGEIVPMEVNFNFDDPNLIILPLAFGKRQGREFIWNDLLSLETGSLKLANGRVIEKTLYNRRTRQDEPALFVALTFERREVLDSSNIKPMNLIGVDRGENIPAVIALTDPEGCPLSRFKDSLGNPTHILRIGESYKEKQRTIQAKKEVEQRRAGGYSRKYASKAKNLADDMVRNTARDLLYYAVTQDAMLIFENLSRGFGRQGKRTFMAERQYTRMEDWLTAKLAYEGLPSKTYLSKTLAQYTSKTCSNCGFTITSADYDRVLEKLKKTATGWMTTINGKELKVEGQITYYNRYKRQNVVKDLSVELDRLSEESVNNDISSWTKGRSGEALSLLKKRFSHRPVQEKFVCLNCGFETHADEQAALNIARSWLFLRSQEYKKYQTNKTTGNTDKRAFVETWQSFYRKKLKEVWKPAV

SEQ ID NO: 20005 - protein, 980 aa, synthetic construct
MQEIKGRINKIRRRLVKDSNTKKAGKTGPMKTLLVRVMTPDLRERLENLRKKPENIPQPISNTSRANLNKLLTDYTEMKKAILHVYWEEFQKDPVGLMSRVAQPASKKIDQNKLKPEMDEKGNLTTAGFACSQCGQPLFVYKLEQVSEKGKAYTNYFGRCNVAEHEKLILLAQLKPEKDSDEAVTYSLGKFGQRALDFYSIHVTKESTHPVKPLAQIAGNRYASGPVGKALSDACMGTIASFLSKYQDIIIEHQKVVKGNQKRLESLRELAGKENLEYPSVTLPPQPHTKEGVDAYNEVIARVRMWVNLNLWQKLKLSRDDAKPLLRLKGFPSFPLVERQANEVDWWDMVCNVKKLINEKKEDGKVFWQNLAGYKRQEALRPYLSSEEDRKKGKKFARTQLGDLLLHLEKKHGEDWGKVYDEAWERIDKKVEGLSKHIKLEEERRSEDAQSKAALTDWLRAKASFVIEGLKEADKDEFCRCELKLQKWYGDLRGKPFAIEAENSILDISGFSKQYNCAFIWQKDGVKKLNLYLIINYFKGGKLRFKKIKPEAFEANRFYTVINKKSGEIVPMEVNFNFDDPNLIILPLAFGKRQGREFIWNDLLSLETGSLKLANGRVIEKTLYNRRTRQDEPALFVALTFERREVLDSSNIKPMNLIGVDRGENIPAVIALTDPEGCPLSRFKDSLGNPTHILRIGESYKEKQRTIQAKKEVEQRRAGGYSRKYASKAKNLADDMVRNTARDLLYYAVTQDAMLIFENLSRGFGRQGKRTFMAERQYTRMEDWLTAKLAYEGLPSKTYLSKTLAQYTSKTCSNCGFTITSADYDRVLEKLKKTATGWMTTINGKELKVEGQITYYNRYKRQNVVKDLSVELDRLSEESVNNDISSWTKGRSGEALSLLKKRFSHRPVQEKFVCLNCGFETHADEQAALNIARSWLFLRSQEYKKYQTNKTTGNTDKRAFVETWQSFYRKKLKEVWKPAV

SEQ ID NO: 20006 - protein, 980 aa, synthetic construct
MQEIKGRINKIRRRLVKDSNTKKAGKTGPMKTLLVRVMTPDLRERLENLRKKPENIPQPISNTSRANLNKLLTDYTEMKKAILHVYWEEFQKDPVGLMSRVAQPASKKIDQNKLKPEMDEKGNLTTAGFACSQCGQPLFVYKLEQVSEKGKAYTNYFGRCNVAEHEKLILLAQLKPEKDSDEAVTYSLGKFGQRALDFYSIHVTKESTHPVKPLAQIAGNRYASGPVGKALSDACMGTIASFLSKYQDIIIEHQKVVKGNQKRLESLRELAGKENLEYPSVTLPPQPHTKEGVDAYNEVIARVRMWVNLNLWQKLKLSRDDAKPLLRLKGFPSFPLVERQANEVDWWDMVCNVKKLINEKKEDGKVFWQNLAGYKRQEALRPYLSSEEDRKKGKKFARYQLGDLLLHLEKKHGEDWGKVYDEAWERIDKKVEGLSKHIKLEEERRSEDAQSKAALTDWLRAKASFVIEGLKEADKDEFCRCELKLQKWYGDLRGKPFAIEAENSILDISGFSKQYNCAFIWQKDGVKKLNLYLIINYFKGGKLRFKKIKPEAFEANRFYTVINKKSGEIVPMEVNFNFDDPNLIILPLAFGKRQGREFIWNDLLSLETGSLKLANGRVIEKTLYNRRTRQDEPALFVALTFERREVLDSSNIKPMNLIGVDRGENIPAVIALTDPEGCPLSRFKDSLGNPTHILRIGESYKEKQRTIQAKKEVEQRRAGGYSRKYASKAKNLADDMVRNTARDLLYYAVTQDAMLIFENLSRGFGRQGKRTFMAERQYTRMEDWLTAKLAYEGLPSKTYLSKTLAQYTSKTCSNCGFTITSADYDRVLEKLKKTATGWMTTINGKELKVEGQITYYNRYKRQNVVKDLSVELDRLSEESVNNDISSWTKGRQGEALSLLKKRFSHRPVQEKFVCLNCGFETHADEQAALNIARSWLFLRSQEYKKYQTNKTTGNTDKRAFVETWQSFYRKKLKEVWKPAV

SEQ ID NO: 20007 - protein, 980 aa, synthetic construct
MQEIKRINKIRRRLVKDSNTKKAGKTRGPMKTLLVRVMTPDLRERLENLRKKPENIPQPISNTSRANLNKLLTDYTEMKKAILHVYWEEFQKDPVGLMSRVAQPASKKIDQNKLKPEMDEKGNLTTAGFACSQCGQPLFVYKLEQVSEKGKAYTNYFGRCNVAEHEKLILLAQLKPEKDSDEAVTYSLGKFGQRALDFYSIHVTKESTHPVKPLAQIAGNRYASGPVGKALSDACMGTIASFLSKYQDIIIEHQKVVKGNQKRLESLRELAGKENLEYPSVTLPPQPHTKEGVDAYNEVIARVRWWVNLNLWQKLKLSRDDAKPLLRLKGFPSFPLVERQANEVDWWDMVCNVKKLINEKKEDGKVFWQNLAGYKRQEALRPYLSSEEDRKKGKKFARYQLGDLLLHLEKKHGEDWGKVYDEAWERIDKKVEGLSKHIKLEEERRSEDAQSKAALTDWLRAKASFVIEGLKEADKDEFCRCELKLQKWYGDLRGKPFAIEAENSILDISGFSKQYNCAFIWQKDGVKKLNLYLIINYFKGGKLRFKKIKPEAFEANRFYTVINKKSGEIVPMEVNFNFDDPNLIILPLAFGKRQGREFIWNDLLSLETGSLKLANGRVIEKTLYNRRTRQDEPALFVALTFERREVLDSSNIKPMNLIGVDRGENIPAVIALTDPEGCPLSRFKDSLGNPTHILRIGESYKEKQRTIQAKKEVEQRRAGGYSRKYASKAKNLADDMVRNTARDLLYYAVTQDAMLIFENLSRGFGRQGKRTFMAERQYTRMEDWLTAKLAYEGLPSKTYLSKTLAQYTSKTCSNCGFTITSADYDRVLEKLKKTATGWMTTINGKELKVEGQITYYNRYKRQNVVKDLSVELDRLSEESVNNDISSWTKGRSGEALSLLKKRFSHRPVQEKFVCLNCGFETHADEQAALNIARSWLFLRSQEYKKYQTNKTTGNTDKRAFVETWQSFYRKKLKEVWKPAV

SEQ ID NO: 20008 - protein, 979 aa, synthetic construct
MQEIKRINKIRRRLVKDSNTKKAGKTGPMKTLLVRVMTPDLRERLENLRKKPENIPQPISNTSRANLNKLLTDYTEMKKAILHVYWEEFQKDPVGLMSRVAQPASKKIDQNKLKPEMDEKGNLTTAGFACSQCGQPLFVYKLEQVSEKGKAYTNYFGRCNVAEHEKLIKLAQLKPEKDSDEAVTYSLGKFGQRALDFYSIHVTKESTHPVKPLAQIAGNRYASGPVGKALSDACMGTIASFLSKYQDIIIEHQKVVKGNQKRLESLRELAGKENLEYPSVTLPPQPHTKEGVDAYNEVIARVRWWVNLNLWQKLKLSRDDAKPLLRLKGFPSFPLVERQANEVDWWDMVCNVKKLINEKKEDGKVFWQNLAGYKRQEALRPYLSSEEDRKKGKKFARYQLGDLLLHLEKKHGEDWGKVYDEAWERIDKKVEGLSKHIKLEEERRSEDAQSKAALTDWLRAKASFVIEGLKEADKDEFCRCELKLQKWYGDLRGKPFAIEAENSILDISGFSKQYNCAFIWQKDGVKKLNLYLIINYFKGGKLRFKKIKPEAFEANRFYTVINKKSGEIVPMEVNFNFDDPNLIILPLAFGKRQGREFIWNDLLSLETGSLKLANGRVIEKTLYNRRTRQDEPALFVALTFERREVLDSSNIKPMNLIGVDRGENIPAVIALTDPEGCPLSRFKDSLGNPTHILRIGESYKEKQRTIQAKKEVEQRRAGGYSRKYASKAKNLADDMVRNTARDLLYYAVTQDAMLIFENLSRGFGRQGKRTFMAERQYTRMEDWLTAKLAYEGLPSKTYLSKTLAQYTSKTCSNCGFTITSADYDRVLEKLKKTATGWMTTINGKELKVEGQITYYNRYKRQNVVKDLSVELDRLSEESVNNDISSWTKGRSGEALSLLKKRFSHRPVQEKFVCLNCGFETHADEQAALNIARSWLFLRSQEYKKYQTNKTTGNTDKRAFVETWQSFYRKKLKEVWKPAV

SEQ ID NO: 20009 - protein, 979 aa, synthetic construct
MQEIKRINKIRRRLVKDSNTKKAGKTGPMKTLLVRVMTPDLRERLENLRKKPENIPQPISNTSRANLNKLLTDYTEMKKAILHVYWEEFQKDPVGLMSRVAQPASKKIDQNKLKPEMDEKGNLTTAGFACSQCGQPLFVYKLEQVSEKGKAYTNYFGRCNVAEHEKLILLDQLKPEKDSDEAVTYSLGKFGQRALDFYSIHVTKESTHPVKPLAQIAGNRYASGPVGKALSDACMGTIASFLSKYQDIIIEHQKVVKGNQKRLESLRELAGKENLEYPSVTLPPQPHTKEGVDAYNEVIARVRWWVNLNLWQKLKLSRDDAKPLLRLKGFPSFPLVERQANEVDWWDMVCNVKKLINEKKEDGKVFWQNLAGYKRQEALRPYLSSEEDRKKGKKFARYQLGDLLLHLEKKHGEDWGKVYDEAWERIDKKVEGLSKHIKLEEERRSEDAQSKAALTDWLRAKASFVIEGLKEADKDEFCRCELKLQKWYGDLRGKPFAIEAENSILDISGFSKQYNCAFIWQKDGVKKLNLYLIINYFKGGKLRFKKIKPEAFEANRFYTVINKKSGEIVPMEVNFNFDDPNLIILPLAFGKRQGREFIWNDLLSLETGSLKLANGRVIEKTLYNRRTRQDEPALFVALTFERREVLDSSNIKPMNLIGVDRGENIPAVIALTDPEGCPLSRFKDSLGNPTHILRIGESYKEKQRTIQAKKEVEQRRAGGYSRKYASKAKNLADDMVRNTARDLLYYAVTQDAMLIFENLSRGFGRQGKRTFMAERQYTRMEDWLTAKLAYEGLPSKTYLSKTLAQYTSKTCSNCGFTITSADYDRVLEKLKKTATGWMTTINGKELKVEGQITYYNRYKRQNVVKDLSVELDRLSEESVNNDISSWTKGRSGEALSLLKKRFSHRPVQEKFVCLNCGFETHADEQAALNIARSWLFLRSQEYKKYQTNKTTGNTDKRAFVETWQSFYRKKLKEVWKPAV

SEQ ID NO: 20010 - protein, 979 aa, synthetic construct
MQEIKRINKIRRRLVKDSNTKKAGKTGPMKTLLVRVMTPDLRERLENLRKKPENIPQPISNTSRANLNKLLTDYTEMKKAILHVYWEEFQKDPVGLMSRVAQPASKKIDQNKLKPEMDEKGNLTTAGFACSQCGQPLFVYKLEQVSEKGKAYTNYFGRCNVAEHEKLILLAQLKPEKDSDEAVTYSLGKFGQRALDFYSIHVTKESTHPVKPLAQIAGNRYASGPVGKALSDACMGTIASFLSKYQDIIIEHQKVVKGNQKRLESLRELAGKENLEYPSVTLPPQPHTKEGVDAYNEVIARVRWWVNLNLWQKLKLSRDDAKPLLRLKGFPSFPLVERQANEVDWWDMVCNVKKLINEKKEDGKVFWQNLAGYKRQEALRPYLSSEEDRKKGKKFARTQLGDLLLHLEKKHGEDWGKVYDEAWERIDKKVEGLSKHIKLEEERRSEDAQSKAALTDWLRAKASFVIEGLKEADKDEFCRCELKLQKWYGDLRGKPFAIEAENSILDISGFSKQYNCAFIWQKDGVKKLNLYLIINYFKGGKLRFKKIKPEAFEANRFYTVINKKSGEIVPMEVNFNFDDPNLIILPLAFGKRQGREFIWNDLLSLETGSLKLANGRVIEKTLYNRRTRQDEPALFVALTFERREVLDSSNIKPMNLIGVDRGENIPAVIALTDPEGCPLSRFKDSLGNPTHILRIGESYKEKQRTIQAKKEVEQRRAGGYSRKYASKAKNLADDMVRNTARDLLYYAVTQDAMLIFENLSRGFGRQGKRTFMAERQYTRMEDWLTAKLAYEGLPSKTYLSKTLAQYTSKTCSNCGFTITSADYDRVLEKLKKTATGWMTTINGKELKVEGQITYYNRYKRQNVVKDLSVELDRLSEESVNNDISSWTKGRSGEALSLLKKRFSHRPVQEKFVCLNCGFETHADEQAALNIARSWLFLRSQEYKKYQTNKTTGNTDKRAFVETWQSFYRKKLKEVWKPAV

SEQ ID NO: 20011 - protein, 979 aa, synthetic construct
MQEIKRINKIRRRLVKDSNTKKAGKTGPMKTLLVRVMTPDLRERLENLRKKPENIPQPISNTSRANLNKLLTDYTEMKKAILHVYWEEFQKDPVGLMSRVAQPASKKIDQNKLKPEMDEKGNLTTAGFACSQCGQPLFVYKLEQVSEKGKAYTNYFGRCNVAEHEKLILLAQLKPEKDSDEAVTYSLGKFGQRALDFYSIHVTKESTHPVKPLAQIAGNRYASGPVGKALSDACMGTIASFLSKYQDIIIEHQKVVKGNQKRLESLRELAGKENLEYPSVTLPPQPHTKEGVDAYNEVIARVRWWVNLNLWQKLKLSRDDAKPLLRLKGFPSFPLVERQANEVDWWDMVCNVKKLINEKKEDGKVFWQNLAGYKRQEALRPYLSSEEDRKKGKKFARYQLGDLLLHLEKKHGEDWGKVYDEAWERIDKKVEGLSKHIKLEEERRSEDAQSKAALTDWLRAKASFVIEGLKEADKDEFCRCELKLQKWYGDLRGKPFAIEAENSILDISGFSKQYNCAFIWQKDGVKKLNLYLIINYFKGGKLRFKKIKPEAFEANRFYTVINKKSGEIVPMEVNFNFDDPNLIILPLAFGKRQGREFIWNDLLSLETGSLKLANGRVIEKTLYNRRTRQDEPALFVALTFERREVLDSSNIKPMNLIGVDRGENIPAVIALTDPEGCPLSRFKDSLGNPTHILRIGESYKEKQRTIQAKKEVEQRRAGGYSRKYASKAKNLADDMVRNTARDLLYYAVTQDAMLIFENLSRGFGRQGKRTFMAERQYTRMEDWLTAKLAYEGLPSKTYLSKTLAQYTSKTCSNCGFTITSADYDRVLEKLKKTATGWMTTINGKELKVEGQITYYNRYKRQNVVKDLSVELDRLSEESVNNDISSWTKGRQGEALSLLKKRFSHRPVQEKFVCLNCGFETHADEQAALNIARSWLFLRSQEYKKYQTNKTTGNTDKRAFVETWQSFYRKKLKEVWKPAV

SEQ ID NO: 20012 - protein, 980 aa, synthetic construct
MQEIKRINKIRRRLVKDSNTKKAGKTRGPMKTLLVRVMTPDLRERLENLRKKPENIPQPISNTSRANLNKLLTDYTEMKKAILHVYWEEFQKDPVGLMSRVAQPASKKIDQNKLKPEMDEKGNLTTAGFACSQCGQPLFVYKLEQVSEKGKAYTNYFGRCNVAEHEKLILLAQLKPEKDSDEAVTYSLGKFGQRALDFYSIHVTKESTHPVKPLAQIAGNRYASGPVGKALSDACMGTIASFLSKYQDIIIEHQKVVKGNQKRLESLRELAGKENLEYPSVTLPPQPHTKEGVDAYNEVIARVRMWVNLNLWQKLKLSRDDAKPLLRLKGFPSFPLVERQANEVDWWDMVCNVKKLINEKKEDGKVFWQNLAGYKRQEALRPYLSSEEDRKKGKKFARYQLGDLLLHLEKKHGEDWGKVYDEAWERIDKKVEGLSKHIKLEEERRSEDAQSKAALTDWLRAKASFVIEGLKEADKDEFCRCDLKLQKWYGDLRGKPFAIEAENSILDISGFSKQYNCAFIWQKDGVKKLNLYLIINYFKGGKLRFKKIKPEAFEANRFYTVINKKSGEIVPMEVNFNFDDPNLIILPLAFGKRQGREFIWNDLLSLETGSLKLANGRVIEKTLYNRRTRQDEPALFVALTFERREVLDSSNIKPMNLIGVDRGENIPAVIALTDPEGCPLSRFKDSLGNPTHILRIGESYKEKQRTIQAKKEVEQRRAGGYSRKYASKAKNLADDMVRNTARDLLYYAVTQDAMLIFENLSRGFGRQGKRTFMAERQYTRMEDWLTAKLAYEGLPSKTYLSKTLAQYTSKTCSNCGFTITSADYDRVLEKLKKTATGWMTTINGKELKVEGQITYYNRYKRQNVVKDLSVELDRLSEESVNNDISSWTKGRSGEALSLLKKRFSHRPVQEKFVCLNCGFETHADEQAALNIARSWLFLRSQEYKKYQTNKTTGNTDKRAFVETWQSFYRKKLKEVWKPAV

SEQ ID NO: 20013 - protein, 979 aa, synthetic construct
MQEIKRINKIRRRLVKDSNTKKAGKTGPMKTLLVRVMTPDLRERLENLRKKPENIPQPISNTSRANLNKLLTDYTEMKKAILHVYWEEFQKDPVGLMSRVAQPASKKIDQNKLKPEMDEKGNLTTAGFACSQCGQPLFVYKLEQVSEKGKAYTNYFGRCNVAEHEKLIKLAQLKPEKDSDEAVTYSLGKFGQRALDFYSIHVTKESTHPVKPLAQIAGNRYASGPVGKALSDACMGTIASFLSKYQDIIIEHQKVVKGNQKRLESLRELAGKENLEYPSVTLPPQPHTKEGVDAYNEVIARVRMWVNLNLWQKLKLSRDDAKPLLRLKGFPSFPLVERQANEVDWWDMVCNVKKLINEKKEDGKVFWQNLAGYKRQEALRPYLSSEEDRKKGKKFARYQLGDLLLHLEKKHGEDWGKVYDEAWERIDKKVEGLSKHIKLEEERRSEDAQSKAALTDWLRAKASFVIEGLKEADKDEFCRCDLKLQKWYGDLRGKPFAIEAENSILDISGFSKQYNCAFIWQKDGVKKLNLYLIINYFKGGKLRFKKIKPEAFEANRFYTVINKKSGEIVPMEVNFNFDDPNLIILPLAFGKRQGREFIWNDLLSLETGSLKLANGRVIEKTLYNRRTRQDEPALFVALTFERREVLDSSNIKPMNLIGVDRGENIPAVIALTDPEGCPLSRFKDSLGNPTHILRIGESYKEKQRTIQAKKEVEQRRAGGYSRKYASKAKNLADDMVRNTARDLLYYAVTQDAMLIFENLSRGFGRQGKRTFMAERQYTRMEDWLTAKLAYEGLPSKTYLSKTLAQYTSKTCSNCGFTITSADYDRVLEKLKKTATGWMTTINGKELKVEGQITYYNRYKRQNVVKDLSVELDRLSEESVNNDISSWTKGRSGEALSLLKKRFSHRPVQEKFVCLNCGFETHADEQAALNIARSWLFLRSQEYKKYQTNKTTGNTDKRAFVETWQSFYRKKLKEVWKPAV

SEQ ID NO: 20014 - protein, 979 aa, synthetic construct
MQEIKRINKIRRRLVKDSNTKKAGKTGPMKTLLVRVMTPDLRERLENLRKKPENIPQPISNTSRANLNKLLTDYTEMKKAILHVYWEEFQKDPVGLMSRVAQPASKKIDQNKLKPEMDEKGNLTTAGFACSQCGQPLFVYKLEQVSEKGKAYTNYFGRCNVAEHEKLILLDQLKPEKDSDEAVTYSLGKFGQRALDFYSIHVTKESTHPVKPLAQIAGNRYASGPVGKALSDACMGTIASFLSKYQDIIIEHQKVVKGNQKRLESLRELAGKENLEYPSVTLPPQPHTKEGVDAYNEVIARVRMWVNLNLWQKLKLSRDDAKPLLRLKGFPSFPLVERQANEVDWWDMVCNVKKLINEKKEDGKVFWQNLAGYKRQEALRPYLSSEEDRKKGKKFARYQLGDLLLHLEKKHGEDWGKVYDEAWERIDKKVEGLSKHIKLEEERRSEDAQSKAALTDWLRAKASFVIEGLKEADKDEFCRCDLKLQKWYGDLRGKPFAIEAENSILDISGFSKQYNCAFIWQKDGVKKLNLYLIINYFKGGKLRFKKIKPEAFEANRFYTVINKKSGEIVPMEVNFNFDDPNLIILPLAFGKRQGREFIWNDLLSLETGSLKLANGRVIEKTLYNRRTRQDEPALFVALTFERREVLDSSNIKPMNLIGVDRGENIPAVIALTDPEGCPLSRFKDSLGNPTHILRIGESYKEKQRTIQAKKEVEQRRAGGYSRKYASKAKNLADDMVRNTARDLLYYAVTQDAMLIFENLSRGFGRQGKRTFMAERQYTRMEDWLTAKLAYEGLPSKTYLSKTLAQYTSKTCSNCGFTITSADYDRVLEKLKKTATGWMTTINGKELKVEGQITYYNRYKRQNVVKDLSVELDRLSEESVNNDISSWTKGRSGEALSLLKKRFSHRPVQEKFVCLNCGFETHADEQAALNIARSWLFLRSQEYKKYQTNKTTGNTDKRAFVETWQSFYRKKLKEVWKPAV

SEQ ID NO: 20015 - protein, 979 aa, synthetic construct
MQEIKRINKIRRRLVKDSNTKKAGKTGPMKTLLVRVMTPDLRERLENLRKKPENIPQPISNTSRANLNKLLTDYTEMKKAILHVYWEEFQKDPVGLMSRVAQPASKKIDQNKLKPEMDEKGNLTTAGFACSQCGQPLFVYKLEQVSEKGKAYTNYFGRCNVAEHEKLILLAQLKPEKDSDEAVTYSLGKFGQRALDFYSIHVTKESTHPVKPLAQIAGNRYASGPVGKALSDACMGTIASFLSKYQDIIIEHQKVVKGNQKRLESLRELAGKENLEYPSVTLPPQPHTKEGVDAYNEVIARVRTWVNLNLWQKLKLSRDDAKPLLRLKGFPSFPLVERQANEVDWWDMVCNVKKLINEKKEDGKVFWQNLAGYKRQEALRPYLSSEEDRKKGKKFARYQLGDLLLHLEKKHGEDWGKVYDEAWERIDKKVEGLSKHIKLEEERRSEDAQSKAALTDWLRAKASFVIEGLKEADKDEFCRCDLKLQKWYGDLRGKPFAIEAENSILDISGFSKQYNCAFIWQKDGVKKLNLYLIINYFKGGKLRFKKIKPEAFEANRFYTVINKKSGEIVPMEVNFNFDDPNLIILPLAFGKRQGREFIWNDLLSLETGSLKLANGRVIEKTLYNRRTRQDEPALFVALTFERREVLDSSNIKPMNLIGVDRGENIPAVIALTDPEGCPLSRFKDSLGNPTHILRIGESYKEKQRTIQAKKEVEQRRAGGYSRKYASKAKNLADDMVRNTARDLLYYAVTQDAMLIFENLSRGFGRQGKRTFMAERQYTRMEDWLTAKLAYEGLPSKTYLSKTLAQYTSKTCSNCGFTITSADYDRVLEKLKKTATGWMTTINGKELKVEGQITYYNRYKRQNVVKDLSVELDRLSEESVNNDISSWTKGRSGEALSLLKKRFSHRPVQEKFVCLNCGFETHADEQAALNIARSWLFLRSQEYKKYQTNKTTGNTDKRAFVETWQSFYRKKLKEVWKPAV

SEQ ID NO: 20016 - protein, 979 aa, synthetic construct
MQEIKRINKIRRRLVKDSNTKKAGKTGPMKTLLVRVMTPDLRERLENLRKKPENIPQPISNTSRANLNKLLTDYTEMKKAILHVYWEEFQKDPVGLMSRVAQPASKKIDQNKLKPEMDEKGNLTTAGFACSQCGQPLFVYKLEQVSEKGKAYTNYFGRCNVAEHEKLILLAQLKPEKDSDEAVTYSLGKFGQRALDFYSIHVTKESTHPVKPLAQIAGNRYASGPVGKALSDACMGTIASFLSKYQDIIIEHQKVVKGNQKRLESLRELAGKENLEYPSVTLPPQPHTKEGVDAYNEVIARVRMWVNLNLWQKLKLSRDDAKPLLRLKGFPSFPLVERQANEVDWWDMVCNVKKLINEKKEDGKVFWQNLAGYKRQEALRPYLSSEEDRKKGKKFARTQLGDLLLHLEKKHGEDWGKVYDEAWERIDKKVEGLSKHIKLEEERRSEDAQSKAALTDWLRAKASFVIEGLKEADKDEFCRCDLKLQKWYGDLRGKPFAIEAENSILDISGFSKQYNCAFIWQKDGVKKLNLYLIINYFKGGKLRFKKIKPEAFEANRFYTVINKKSGEIVPMEVNFNFDDPNLIILPLAFGKRQGREFIWNDLLSLETGSLKLANGRVIEKTLYNRRTRQDEPALFVALTFERREVLDSSNIKPMNLIGVDRGENIPAVIALTDPEGCPLSRFKDSLGNPTHILRIGESYKEKQRTIQAKKEVEQRRAGGYSRKYASKAKNLADDMVRNTARDLLYYAVTQDAMLIFENLSRGFGRQGKRTFMAERQYTRMEDWLTAKLAYEGLPSKTYLSKTLAQYTSKTCSNCGFTITSADYDRVLEKLKKTATGWMTTINGKELKVEGQITYYNRYKRQNVVKDLSVELDRLSEESVNNDISSWTKGRSGEALSLLKKRFSHRPVQEKFVCLNCGFETHADEQAALNIARSWLFLRSQEYKKYQTNKTTGNTDKRAFVETWQSFYRKKLKEVWKPAV

SEQ ID NO: 20017 - protein, 979 aa, synthetic construct
MQEIKRINKIRRRLVKDSNTKKAGKTGPMKTLLVRVMTPDLRERLENLRKKPENIPQPISNTSRANLNKLLTDYTEMKKAILHVYWEEFQKDPVGLMSRVAQPASKKIDQNKLKPEMDEKGNLTTAGFACSQCGQPLFVYKLEQVSEKGKAYTNYFGRCNVAEHEKLILLAQLKPEKDSDEAVTYSLGKFGQRALDFYSIHVTKESTHPVKPLAQIAGNRYASGPVGKALSDACMGTIASFLSKYQDIIIEHQKVVKGNQKRLESLRELAGKENLEYPSVTLPPQPHTKEGVDAYNEVIARVRMWVNLNLWQKLKLSRDDAKPLLRLKGFPSFPLVERQANEVDWWDMVCNVKKLINEKKEDGKVFWQNLAGYKRQEALRPYLSSEEDRKKGKKFARYQLGDLLLHLEKKHGEDWGKVYDEAWERIDKKVEGLSKHIKLEEERRSEDAQSKAALTDWLRAKASFVIEGLKEADKDEFCRCDLKLQKWYGDLRGKPFAIEAENSILDISGFSKQYNCAFIWQKDGVKKLNLYLIINYFKGGKLRFKKIKPEAFEANRFYTVINKKSGEIVPMEVNFNFDDPNLIILPLAFGKRQGREFIWNDLLSLETGSLKLANGRVIEKTLYNRRTRQDEPALFVALTFERREVLDSSNIKPMNLIGVDRGENIPAVIALTDPEGCPLSRFKDSLGNPTHILRIGESYKEKQRTIQAKKEVEQRRAGGYSRKYASKAKNLADDMVRNTARDLLYYAVTQDAMLIFENLSRGFGRQGKRTFMAERQYTRMEDWLTAKLAYEGLPSKTYLSKTLAQYTSKTCSNCGFTITSADYDRVLEKLKKTATGWMTTINGKELKVEGQITYYNRYKRQNVVKDLSVELDRLSEESVNNDISSWTKGRQGEALSLLKKRFSHRPVQEKFVCLNCGFETHADEQAALNIARSWLFLRSQEYKKYQTNKTTGNTDKRAFVETWQSFYRKKLKEVWKPAV

SEQ ID NO: 20018 - protein, 980 aa, synthetic construct
MQEIKRINKIRRRLVKDSNTKKAGKTRGPMKTLLVRVMTPDLRERLENLRKKPENIPQPISNTSRANLNKLLTDYTEMKKAILHVYWEEFQKDPVGLMSRVAQPASKKIDQNKLKPEMDEKGNLTTAGFACSQCGQPLFVYKLEQVSEKGKAYTNYFGRCNVAEHEKLILLAQLKPEKDSDEAVTYSLGKFGQRALDFYSIHVTKESTHPVKPLAQIAGNRYASGPVGKALSDACMGTIASFLSKYQDIIIEHQKVVKGNQKRLESLRELAGKENLEYPSVTLPPQPHTKEGVDAYNEVIARVRMWVNLNLWQKLKLSRDDAKPLLRLKGFPSFPLVERQANEVDWWDMVCNVKKLINEKKEDGKVFWQNLAGYKRQEALRPYLSSEEDRKKGKKFARYQLGDLLLHLEKKHGEDWGKVYDEAWERIDKKVEGLSKHIKLEEERRSEDAQSKAALTDWLRAKASFVIEGLKEADKDEFCRCELKLQKWYGDLRGKPFAIEAENSILDISGFSKQYNCAFIWQKDGVKKLNLYLIINYFKGGKLRFKKIKPEAFEANRFYTVINKKSGEIVPMEVNFNFDDPNLIILPLAFGKRQGREFIWNDLLSLETGSLKLANGRVIEKTLYNRRTRQDEPALFVALTFERREVLDSSNIKPMNLIGVDRGENIPAVIALTDPEGCPLSRFKDSLGNPTHILRIGERYKEKQRTIQAKKEVEQRRAGGYSRKYASKAKNLADDMVRNTARDLLYYAVTQDAMLIFENLSRGFGRQGKRTFMAERQYTRMEDWLTAKLAYEGLPSKTYLSKTLAQYTSKTCSNCGFTITSADYDRVLEKLKKTATGWMTTINGKELKVEGQITYYNRYKRQNVVKDLSVELDRLSEESVNNDISSWTKGRSGEALSLLKKRFSHRPVQEKFVCLNCGFETHADEQAALNIARSWLFLRSQEYKKYQTNKTTGNTDKRAFVETWQSFYRKKLKEVWKPAV

SEQ ID NO: 20019 - protein, 979 aa, synthetic construct
MQEIKRINKIRRRLVKDSNTKKAGKTGPMKTLLVRVMTPDLRERLENLRKKPENIPQPISNTSRANLNKLLTDYTEMKKAILHVYWEEFQKDPVGLMSRVAQPASKKIDQNKLKPEMDEKGNLTTAGFACSQCGQPLFVYKLEQVSEKGKAYTNYFGRCNVAEHEKLIKLAQLKPEKDSDEAVTYSLGKFGQRALDFYSIHVTKESTHPVKPLAQIAGNRYASGPVGKALSDACMGTIASFLSKYQDIIIEHQKVVKGNQKRLESLRELAGKENLEYPSVTLPPQPHTKEGVDAYNEVIARVRMWVNLNLWQKLKLSRDDAKPLLRLKGFPSFPLVERQANEVDWWDMVCNVKKLINEKKEDGKVFWQNLAGYKRQEALRPYLSSEEDRKKGKKFARYQLGDLLLHLEKKHGEDWGKVYDEAWERIDKKVEGLSKHIKLEEERRSEDAQSKAALTDWLRAKASFVIEGLKEADKDEFCRCELKLQKWYGDLRGKPFAIEAENSILDISGFSKQYNCAFIWQKDGVKKLNLYLIINYFKGGKLRFKKIKPEAFEANRFYTVINKKSGEIVPMEVNFNFDDPNLIILPLAFGKRQGREFIWNDLLSLETGSLKLANGRVIEKTLYNRRTRQDEPALFVALTFERREVLDSSNIKPMNLIGVDRGENIPAVIALTDPEGCPLSRFKDSLGNPTHILRIGERYKEKQRTIQAKKEVEQRRAGGYSRKYASKAKNLADDMVRNTARDLLYYAVTQDAMLIFENLSRGFGRQGKRTFMAERQYTRMEDWLTAKLAYEGLPSKTYLSKTLAQYTSKTCSNCGFTITSADYDRVLEKLKKTATGWMTTINGKELKVEGQITYYNRYKRQNVVKDLSVELDRLSEESVNNDISSWTKGRSGEALSLLKKRFSHRPVQEKFVCLNCGFETHADEQAALNIARSWLFLRSQEYKKYQTNKTTGNTDKRAFVETWQSFYRKKLKEVWKPAV

SEQ ID NO: 20020 - protein, 979 aa, synthetic construct
MQEIKRINKIRRRLVKDSNTKKAGKTGPMKTLLVRVMTPDLRERLENLRKKPENIPQPISNTSRANLNKLLTDYTEMKKAILHVYWEEFQKDPVGLMSRVAQPASKKIDQNKLKPEMDEKGNLTTAGFACSQCGQPLFVYKLEQVSEKGKAYTNYFGRCNVAEHEKLILLDQLKPEKDSDEAVTYSLGKFGQRALDFYSIHVTKESTHPVKPLAQIAGNRYASGPVGKALSDACMGTIASFLSKYQDIIIEHQKVVKGNQKRLESLRELAGKENLEYPSVTLPPQPHTKEGVDAYNEVIARVRMWVNLNLWQKLKLSRDDAKPLLRLKGFPSFPLVERQANEVDWWDMVCNVKKLINEKKEDGKVFWQNLAGYKRQEALRPYLSSEEDRKKGKKFARYQLGDLLLHLEKKHGEDWGKVYDEAWERIDKKVEGLSKHIKLEEERRSEDAQSKAALTDWLRAKASFVIEGLKEADKDEFCRCELKLQKWYGDLRGKPFAIEAENSILDISGFSKQYNCAFIWQKDGVKKLNLYLIINYFKGGKLRFKKIKPEAFEANRFYTVINKKSGEIVPMEVNFNFDDPNLIILPLAFGKRQGREFIWNDLLSLETGSLKLANGRVIEKTLYNRRTRQDEPALFVALTFERREVLDSSNIKPMNLIGVDRGENIPAVIALTDPEGCPLSRFKDSLGNPTHILRIGERYKEKQRTIQAKKEVEQRRAGGYSRKYASKAKNLADDMVRNTARDLLYYAVTQDAMLIFENLSRGFGRQGKRTFMAERQYTRMEDWLTAKLAYEGLPSKTYLSKTLAQYTSKTCSNCGFTITSADYDRVLEKLKKTATGWMTTINGKELKVEGQITYYNRYKRQNVVKDLSVELDRLSEESVNNDISSWTKGRSGEALSLLKKRFSHRPVQEKFVCLNCGFETHADEQAALNIARSWLFLRSQEYKKYQTNKTTGNTDKRAFVETWQSFYRKKLKEVWKPAV

SEQ ID NO: 20021 - protein, 979 aa, synthetic construct
MQEIKRINKIRRRLVKDSNTKKAGKTGPMKTLLVRVMTPDLRERLENLRKKPENIPQPISNTSRANLNKLLTDYTEMKKAILHVYWEEFQKDPVGLMSRVAQPASKKIDQNKLKPEMDEKGNLTTAGFACSQCGQPLFVYKLEQVSEKGKAYTNYFGRCNVAEHEKLILLAQLKPEKDSDEAVTYSLGKFGQRALDFYSIHVTKESTHPVKPLAQIAGNRYASGPVGKALSDACMGTIASFLSKYQDIIIEHQKVVKGNQKRLESLRELAGKENLEYPSVTLPPQPHTKEGVDAYNEVIARVRTWVNLNLWQKLKLSRDDAKPLLRLKGFPSFPLVERQANEVDWWDMVCNVKKLINEKKEDGKVFWQNLAGYKRQEALRPYLSSEEDRKKGKKFARYQLGDLLLHLEKKHGEDWGKVYDEAWERIDKKVEGLSKHIKLEEERRSEDAQSKAALTDWLRAKASFVIEGLKEADKDEFCRCELKLQKWYGDLRGKPFAIEAENSILDISGFSKQYNCAFIWQKDGVKKLNLYLIINYFKGGKLRFKKIKPEAFEANRFYTVINKKSGEIVPMEVNFNFDDPNLIILPLAFGKRQGREFIWNDLLSLETGSLKLANGRVIEKTLYNRRTRQDEPALFVALTFERREVLDSSNIKPMNLIGVDRGENIPAVIALTDPEGCPLSRFKDSLGNPTHILRIGERYKEKQRTIQAKKEVEQRRAGGYSRKYASKAKNLADDMVRNTARDLLYYAVTQDAMLIFENLSRGFGRQGKRTFMAERQYTRMEDWLTAKLAYEGLPSKTYLSKTLAQYTSKTCSNCGFTITSADYDRVLEKLKKTATGWMTTINGKELKVEGQITYYNRYKRQNVVKDLSVELDRLSEESVNNDISSWTKGRSGEALSLLKKRFSHRPVQEKFVCLNCGFETHADEQAALNIARSWLFLRSQEYKKYQTNKTTGNTDKRAFVETWQSFYRKKLKEVWKPAV

SEQ ID NO: 20022 - protein, 979 aa, synthetic construct
MQEIKRINKIRRRLVKDSNTKKAGKTGPMKTLLVRVMTPDLRERLENLRKKPENIPQPISNTSRANLNKLLTDYTEMKKAILHVYWEEFQKDPVGLMSRVAQPASKKIDQNKLKPEMDEKGNLTTAGFACSQCGQPLFVYKLEQVSEKGKAYTNYFGRCNVAEHEKLILLAQLKPEKDSDEAVTYSLGKFGQRALDFYSIHVTKESTHPVKPLAQIAGNRYASGPVGKALSDACMGTIASFLSKYQDIIIEHQKVVKGNQKRLESLRELAGKENLEYPSVTLPPQPHTKEGVDAYNEVIARVRMWVNLNLWQKLKLSRDDAKPLLRLKGFPSFPLVERQANEVDWWDMVCNVKKLINEKKEDGKVFWQNLAGYKRQEALRPYLSSEEDRKKGKKFARTQLGDLLLHLEKKHGEDWGKVYDEAWERIDKKVEGLSKHIKLEEERRSEDAQSKAALTDWLRAKASFVIEGLKEADKDEFCRCELKLQKWYGDLRGKPFAIEAENSILDISGFSKQYNCAFIWQKDGVKKLNLYLIINYFKGGKLRFKKIKPEAFEANRFYTVINKKSGEIVPMEVNFNFDDPNLIILPLAFGKRQGREFIWNDLLSLETGSLKLANGRVIEKTLYNRRTRQDEPALFVALTFERREVLDSSNIKPMNLIGVDRGENIPAVIALTDPEGCPLSRFKDSLGNPTHILRIGERYKEKQRTIQAKKEVEQRRAGGYSRKYASKAKNLADDMVRNTARDLLYYAVTQDAMLIFENLSRGFGRQGKRTFMAERQYTRMEDWLTAKLAYEGLPSKTYLSKTLAQYTSKTCSNCGFTITSADYDRVLEKLKKTATGWMTTINGKELKVEGQITYYNRYKRQNVVKDLSVELDRLSEESVNNDISSWTKGRSGEALSLLKKRFSHRPVQEKFVCLNCGFETHADEQAALNIARSWLFLRSQEYKKYQTNKTTGNTDKRAFVETWQSFYRKKLKEVWKPAV

SEQ ID NO: 20023 - protein, 979 aa, synthetic construct
MQEIKRINKIRRRLVKDSNTKKAGKTGPMKTLLVRVMTPDLRERLENLRKKPENIPQPISNTSRANLNKLLTDYTEMKKAILHVYWEEFQKDPVGLMSRVAQPASKKIDQNKLKPEMDEKGNLTTAGFACSQCGQPLFVYKLEQVSEKGKAYTNYFGRCNVAEHEKLILLAQLKPEKDSDEAVTYSLGKFGQRALDFYSIHVTKESTHPVKPLAQIAGNRYASGPVGKALSDACMGTIASFLSKYQDIIIEHQKVVKGNQKRLESLRELAGKENLEYPSVTLPPQPHTKEGVDAYNEVIARVRMWVNLNLWQKLKLSRDDAKPLLRLKGFPSFPLVERQANEVDWWDMVCNVKKLINEKKEDGKVFWQNLAGYKRQEALRPYLSSEEDRKKGKKFARYQLGDLLLHLEKKHGEDWGKVYDEAWERIDKKVEGLSKHIKLEEERRSEDAQSKAALTDWLRAKASFVIEGLKEADKDEFCRCELKLQKWYGDLRGKPFAIEAENSILDISGFSKQYNCAFIWQKDGVKKLNLYLIINYFKGGKLRFKKIKPEAFEANRFYTVINKKSGEIVPMEVNFNFDDPNLIILPLAFGKRQGREFIWNDLLSLETGSLKLANGRVIEKTLYNRRTRQDEPALFVALTFERREVLDSSNIKPMNLIGVDRGENIPAVIALTDPEGCPLSRFKDSLGNPTHILRIGERYKEKQRTIQAKKEVEQRRAGGYSRKYASKAKNLADDMVRNTARDLLYYAVTQDAMLIFENLSRGFGRQGKRTFMAERQYTRMEDWLTAKLAYEGLPSKTYLSKTLAQYTSKTCSNCGFTITSADYDRVLEKLKKTATGWMTTINGKELKVEGQITYYNRYKRQNVVKDLSVELDRLSEESVNNDISSWTKGRQGEALSLLKKRFSHRPVQEKFVCLNCGFETHADEQAALNIARSWLFLRSQEYKKYQTNKTTGNTDKRAFVETWQSFYRKKLKEVWKPAV

SEQ ID NO: 20024 - protein, 979 aa, synthetic construct
MQEIKRINKIRRRLVKDSNTKKAGKTGPMKTLLVRVMTPDLRERLENLRKKPENIPQPISNTSRANLNKLLTDYTEMKKAILHVYWEEFQKDPVGLMSRVAQPASKKIDQNKLKPEMDEKGNLTTAGFACSQCGQPLFVYKLEQVSEKGKAYTNYFGRCNVAEHEKLILLAQLKPEKDSDEAVTYSLGKFGQRALDFYSIHVTKESTHPVKPLAQIAGNRYASGPVGKALSDACMGTIASFLSKYQDIIIEHQKVVKGNQKRLESLRELAGKENLEYPSVTLPPQPHTKEGVDAYNEVIARVRMWVNLNLWQKLKLSRDDAKPLLRLKGFPSFPLVERQANEVDWWDMVCNVKKLINEKKEDGKVFWQNLAGYKRQEALRPYLSSEEDRKKGKKFARYQLGDLLLHLEKKHGEDWGKVYDEAWERIDKKVEGLSKHIKLEEERRSEDAQSKAALTDWLRAKASFVIEGLKEADKDEFCRCELKLQKWYGDLRGKPFAIEAENSILDISGFSKQYNCAFIWQKDGVKKLNLYLIINYFKGGKLRFKKIKPEAFEANRFYTVINKKSGEIVPMEVNFNFDDPNLIILPLAFGKRQGREFIWNDLLSLETGSLKLANGRVIEKTLYNRRTRQDEPALFVALTFERREVLDSSNIKPMNLIGVDRGENIPAVIALTDPEGCPLSRFKDSLGNPTHILRIGESYKEKQRTIQAKKEVEQRRAGGYSRKYASKAKNLADDMVRNTARDLLYYAVTQDAMLIFENLSRGFGRQGKRTFMAERQYTRMEDWLTAKLAYEGLPSKTYLSKTLAQYTSKTCSNCGFTITSADYDRVLEKLKKTATGWMTTINGKELKVEGQITYYNRYKRQNVVKDLSVELDRLSEESVNNDISSWTKGRSGEALSLLKKRFSHRPVQEKFVCLNCGFETHADEQAALNIARSWLFLRSQEYKKYQTNKTTGNTDKRAFVETWQSFYRKKLKEVWKPAV

SEQ ID NO: 20025 - DNA, 60 bp, synthetic construct
  source 1..60: mol_type = other DNA
tgaagctgacagcattcgggccgagatgtctcgctccgtggccttagctgtgctcgcgct

SEQ ID NO: 20026 - DNA, 60 bp, synthetic construct
  source 1..60: mol_type = other DNA
agcgcgagcacagctaaggccacggagcgagacatctcggcccgaatgctgtcagcttca

SEQ ID NO: 20027 - DNA, 60 bp, synthetic construct
  source 1..60: mol_type = other DNA
tgaagctgacagcattcgggcctagatgtctcgctccgtggccttagctgtgctcgcgct

SEQ ID NO: 20028 - DNA, 60 bp, synthetic construct
  source 1..60: mol_type = other DNA
agcgcgagcacagctaaggccacggagcgagacatctaggcccgaatgctgtcagcttca

SEQ ID NO: 20029 - DNA, 60 bp, synthetic construct
  source 1..60: mol_type = other DNA
tgaagctgacagcattcgggccgagatatctcgctccgtggccttagctgtgctcgcgct

SEQ ID NO: 20030 - DNA, 60 bp, synthetic construct
  source 1..60: mol_type = other DNA
agcgcgagcacagctaaggccacggagcgagatatctcggcccgaatgctgtcagcttca

SEQ ID NO: 20031 - DNA, 60 bp, synthetic construct
  source 1..60: mol_type = other DNA
tgaagctgacagcattcgggccgagatgtctcgatccgtggccttagctgtgctcgcgct

SEQ ID NO: 20032 - DNA, 60 bp, synthetic construct
  source 1..60: mol_type = other DNA
agcgcgagcacagctaaggccacggatcgagacatctcggcccgaatgctgtcagcttca

SEQ ID NO: 20033 - DNA, 60 bp, synthetic construct
  source 1..60: mol_type = other DNA
ctttcagcaaggactggtctttctatctcttgtactacactgaattcacccccactgaaa

SEQ ID NO: 20034 - DNA, 60 bp, synthetic construct
  source 1..60: mol_type = other DNA
tttcagtgggggtgaattcagtgtagtacaagagatagaaagaccagtccttgctgaaag

SEQ ID NO: 20035 - DNA, 60 bp, synthetic construct
  source 1..60: mol_type = other DNA
ctttcagcaaggactggtctttctatctcttgtacgacactgaattcacccccactgaaa

SEQ ID NO: 20036 - DNA, 60 bp, synthetic construct
  source 1..60: mol_type = other DNA
tttcagtgggggtgaattcagtgtcgtacaagagatagaaagaccagtccttgctgaaag

SEQ ID NO: 20037 - DNA, 60 bp, synthetic construct
  source 1..60: mol_type = other DNA
ctttcagcaaggactggtctttctatctctcgtactacactgaattcacccccactgaaa

SEQ ID NO: 20038 - DNA, 60 bp, synthetic construct
  source 1..60: mol_type = other DNA
tttcagtgggggtgaattcagtgtagtacgagagatagaaagaccagtccttgctgaaag

SEQ ID NO: 20039 - DNA, 60 bp, synthetic construct
  source 1..60: mol_type = other DNA
ctttcagcaaggactggtctttctgtctcttgtactacactgaattcacccccactgaaa

SEQ ID NO: 20040 - DNA, 60 bp, synthetic construct
  source 1..60: mol_type = other DNA
tttcagtgggggtgaattcagtgtagtacaagagacagaaagaccagtccttgctgaaag
